United States Patent Application Publication US 2010/0209914 A1 - sequence listing, part 2

SEQ ID NO: 969 - DNA, 514 bp, Homo sapiens
  misc_feature (5)..(6): n is a, c, g, or t
  misc_feature (393)..(393): n is a, c, g, or t
  misc_feature (447)..(447): n is a, c, g, or t
  misc_feature (472)..(472): n is a, c, g, or t
  misc_feature (477)..(477): n is a, c, g, or t
  misc_feature (505)..(505): n is a, c, g, or t
tttannataagtcatcttcagactctgatgcttgtctaaactgcagggttcccgagttaatgtaaaatcctccatacttcgtagtcaaagaagcaggaacaagctcatcatacgcctcagagttatcgatgaaggagtcggattcatcataaccataccccatatcgatcaagtcctgtattcggtcttttctacgtttctttccaccgtatttttcttcaaattttcgggcaagggcctctactttatgcctttccttttcttcgtcattgaaaggatctgacagatctttcttcttatctccagggctgaaggctttttaccttccctcggatattcttcaccagctctggggtaggaaggaactctggggcagcgtttgtggatctgggntcaaagaggggtgagtgtaaatccgaacagctgctgcagccggctcacagtccngatgctgttctcccgccccagcctnctccntccggggctttcttcaaaaacggagggnttcagggga

SEQ ID NO: 970 - DNA, 484 bp, Homo sapiens
  misc_feature (3)..(3): n is a, c, g, or t
  misc_feature (7)..(8): n is a, c, g, or t
  misc_feature (428)..(428): n is a, c, g, or t
  misc_feature (444)..(444): n is a, c, g, or t
  misc_feature (478)..(478): n is a, c, g, or t
tanggtnntcaacatacaattcactctctgctgctgggaatctgagactgattgtgaagatttcttcccatccacactccccttcctcaaaaagaagcccagaagggaaaaacagtgtaacctactagagctcaagactgagtggccaggcagaagatgtttttcaattgtttccagggaagctcatgtctttcacccaggcagaggctctacataaaaccttctaagtgagcaaatgagcccttgtgcaagaccatggacatgtgaatttctcttcgcaactcagcacagcagctttcctaacacattgggagaagtcccaaccaatgggcaaacagatgggaaaatcagtgcccagttttcacttgaatcacaaccacatccaaacaagctaggaaagctttcagttcttaaacaaacaggcgggnttcaaaatggattctnggggttcaaagtacaggtgggttgggtaggtccngtgggt

SEQ ID NO: 971 - DNA, 517 bp, Homo sapiens
  misc_feature (133)..(133): n is a, c, g, or t
  misc_feature (501)..(501): n is a, c, g, or t
  misc_feature (510)..(510): n is a, c, g, or t
tgggttttgtgggcataaagtcatataaaaataacctattatgggggaaaaagtatcctgtcacaatgacattggatccaaatcacagaatcaaacctattagtgacaacatctgctgtgctaggcaatgganttacaaaggggcatataagacaagctctctcccctcaaggagccaatgattttgctaaagaaataggacatattaatttttttaattttttaaatttttttgtagagacagggtctcactatgttgcccaaggctgatctcccaactcctgggcctcaaatgaccctcccacctcggcctccccaacatgctggggattatagggcagggagccacttgcaccccggccgagggatatatttaatggggaggtaataaggtttattaataccaagggttaaccatggatcccaggtatccaaatgtggtgttttccatttggggtaggtactttcaggggattcttagggccttaaattttccccccnggattgggnataggtg

SEQ ID NO: 972 - DNA, 386 bp, Homo sapiens
  misc_feature (330)..(330): n is a, c, g, or t
  misc_feature (346)..(346): n is a, c, g, or t
gcaaagacaaagccaaaaaattgatgaagtggaaatgcagcaaagcaactgcatgaacaaagatgctgtcattcaaaaactacaggaaaatgttggcgctttttactctctatagcaatttgttgtaaatagactgatcccatcagagtgaacttcaaatgcctactaatgtcagtaacatcttctgattatctggtgtcttttattcaaggattcagaaggaaattgcaaatacattattttaaggtacttatgcaaggaaaacagctgaggagatgattttatcattcatatttcactaccagcaaaatctattttaaatgtaaccantaaaaaatagctaacnattatttcattcttactctatgcaggcactgttacaagca

SEQ ID NO: 973 - DNA, 1348 bp, Homo sapiens
  misc_feature (1104)..(1104): n is a, c, g, or t
ggatcttaacaccacgccttgagcaagtcgcaagagcgggaggacacagaccaggaaccgagaagggacaagcacatggaagccagcccagcatccgggcccagacacttgatggatccacacatattcacttccaactttaacaatggcattggaaggcataagacctacctgtgctacgaagtggagcgcctggacaatggcacctcggtcaagatggaccagcacaggggctttctacacaaccaggctaagaatcttctctgtggcttttacggccgccatgcggagctgcgcttcttggacctggttccttctttgcagttggacccggcccagatctacagggtcacttggttcatctcctggagcccctgcttctcctggggctgtgccggggaagtgcgtgcgttccttcaggagaacacacacgtgagactgcgcatcttcgctgcccgcatctatgattacgaccccctatataaggaggcgctgcaaatgctgcgggatgctggggcccaagtctccatcatgacctacgatgaatttaagcactgctgggacacctttgtggaccaccagggatgtcccttccagccctgggatggactagatgagcacagccaagccctgagtgggaggctgcgggccattctccagaatcagggaaactgaaggatgggcctcagtctctaaggaaggcagagacctgggttgagcagcagaataaaagatcttcttccaagaaatgcaaacagaccgttcaccaccatctccagctgctcacagacgccagcaaagcagtatgctcccgatcaagtagatttttaaaaaatcagagtgggccgggcgcggctgcacgcctgtaatcccagcactttggaggccaaggcgggtggatcacgaggtcaggagatcgagaccatcctggctaacacggtgaaaccctgtctctactaaaaatacaaaaaattagccaggggtggtgcgggcgcctgtagtcccagctactctggaggctgaggcaggagagtacgtgaacccgggaggcagagcttgcggtgagccgagattgcgctactgcactccagcctgggcgacagnaccagactccatctcaaaaaaaaaaaaaaccagactgaattaattttaactgaaaatttctcttatgttccaaggtacacaataggtaagattatgctcaatattctcagaataattttcaatgtattaatgaaatgaaatgataatttggcttcatatctagactaacacaaaattaagaatcttccataattgcttttgctcagtaactgtgtcatgaattgcaagagtttccacaaacact

SEQ ID NO: 974 - DNA, 1863 bp, Homo sapiens
gttttttttttttttttggtaccatagagttgctctgaaaacagaagatagagggagtctcggagctcgcatctccagcgatctctacattgggaaaaaacatggagtcagctccggcagcccccgaccccgccgccagcgagccaggcagcagcggcgcggacgcggccgccggctccagggagaccccgctgaaccaggaatccgcccgcaagagcgagccgcctgccccggtgcgcagacagagctattccagcaccagcagaggtatctcagtaacgaagaagacacatacatctcaaattgaaattattccatgcaagatctgtggagacaaatcatcaggaatccattatggtgtcattacatgtgaaggctgcaagggctttttcaggagaagtcagcaaagcaatgccacctactcctgtcctcgtcagaagaactgtttgattgatcgaaccagtagaaaccgctgccaacactgtcgattacagaaatgccttgccgtagggatgtctcgagatgctgtaaaatttggccgaatgtcaaaaaagcagagagacagcttgtatgcagaagtacagaaacaccggatgcagcagcagcagcgcgaccaccagcagcagcctggagaggctgagccgctgacgcccacctacaacatctcggccaacgggctgacggaacttcacgacgacctcagtaactacattgacgggcacacccctgaggggagtaaggcagactccgccgtcagcagcttctacctggacatacagccttccccagaccagtcaggtcttgatatcaatggaatcaaaccagaaccaatatgtgactacacaccagcatcaggcttctttccctactgttcgttcaccaacggcgagacttccccaactgtgtccatggcagaattagaacaccttgcacagaatatatctaaatcgcatctggaaacctgccaatacttgagagaagagctccagcagataacgtggcagacctttttacaggaagaaattgagaactatcaaaacaagcagcgggaggtgatgtggcaattgtgtgccatcaaaattacagaagctatacagtatgtggtggagtttgccaaacgcattgatggatttatggaactgtgtcaaaatgatcaaattgtgcttctaaaagcaggttctctagaggtggtgtttatcagaatgtgccgtgcctttgactctcagaacaacaccgtgtactttgatgggaagtatgccagccccgacgtcttcaaatccttaggttgtgaagactttattagctttgtgtttgaatttggaaagagtttatgttctatgcacctgactgaagatgaaattgcattattttctgcatttgtactgatgtcagcagatcgctcatggctgcaagaaaaggtaaaaattgaaaaactgcaacagaaaattcagctagctcttcaacacgtcctacagaagaatcaccgagaagatggaatactaacaaagttaatatgcaaggtgtctacattaagagccttatgtggacgacatacagaaaagctaatggcatttaaagcaatatacccagacattgtgcgacttcattttcctccattatacaaggagttgttcacttcagaatttgagccagcaatgcaaattgatgggtaaatgttatcacctaagcacttctagaatgtctgaagtacaaacatgaaaaacaaacaaaaaaattaaccgagacactttatatggccctgcacagacctggagcgccacacactgcacatcttttggtgatcggggtcaggcaaaggaggggaaacaatgaaaacaaataaagttgaacttgtttttctca

SEQ ID NO: 975 - DNA, 1608 bp, Homo sapiens
cagtatccctcctgacaaaactaacaaaaatcctgttagccaaataatcagccacattcatatttaccgtcaaagtttttatcctcattttacagcagtggagagcgattgccccgggtcccacgttaggaagagagagaactgggatttgcacccaggcaatctggggacagagctgtgatcacaactccatgagtcagggccgagccagccccttcaccaccagccggccgcgccccgggaaggaagtttgtggcggaggaggttcgtacgggaggagggggaggcgcccacgcatctggggctgactcgctctttcgcaaaacgtctgggaggagtccctggggccacaaaactgcctccttcctgaggccagaaggagagaagacgtgcagggaccccgcgcacaggagctgccctcgcgacatgggtcacccgccgctgctgccgctgctgctgctgctccacacctgcgtcccagcctcttggggcctgcggtgcatgcagtgtaagaccaacggggattgccgtgtggaagagtgcgccctgggacaggacctctgcaggaccacgatcgtgcgcttgtgggaagaaggagaagagctggagctggtggagaaaagctgtacccactcagagaagaccaacaggaccctgagctatcggactggcttgaagatcaccagccttaccgaggttgtgtgtgggttagacttgtgcaaccagggcaactctggccgggctgtcacctattcccgaagccgttacctcgaatgcatttcctgtggctcatcagacatgagctgtgagaggggccggcaccagagcctgcagtgccgcagccctgaagaacagtgcctggatgtggtgacccactggatccaggaaggtgaagaagtcctggagcttgaaaatctgccgcagaatggccgccagtgttacagctgcaaggggaacagcacccatggatgctcctctgaagagactttcctcattgactgccgaggccccatgaatcaatgtctggtagccaccggcactcacgaaccgaaaaaccaaagctatatggtaagaggctgtgcaaccgcctcaatgtgccaacatgcccacctgggtgacgccttcagcatgaaccacattgatgtctcctgctgtactaaaagtggctgtaaccacccagacctggatgtccagtaccgcagtggggctgctcctcagcctggccctgcccatctcagcctcaccatcaccctgctaatgactgccagactgtggggaggcactctcctctggacctaaacctgaaatccccctctctgccctggctggatccgggggacccctttgcccttccctcggctcccagccctacagacttgctgtgtgacctcaggccagtgtgccgacctctctgggcctcagttttcccagctatgaaaacagctatctcacaaagttgtgtgaagcagaagagaaaagctggaggaaggccgtgggcaatgggagagctcttgttattattaatattgttgccgctgttgtgttgttgttattaattaatattcatattatttattttatacttacataaagattttgtaccagtgg

SEQ ID NO: 976 - DNA, 2864 bp, Homo sapiens
gcccaaagaactcaaacaaatttacaagaaacaaacaaccccatcaacaagtggccgaagatatgaacagacacgtctcagaagaaggcatttatggagacaacagacacgcgaggtcaggaagaagccgcttataaattaccgcttccttcgcgccgccgccaacgccgagccccgaggaccgcaagcccagaggacaagctgcgccaagagggagtgcggacgttcacccagcgggtcagagagcgagcgggcaggcagcccccggccggcggaacccggcacagccgagcagagcgcgggcggcgccgcagccaccccagatccagaaccagaaccacagcccttctgaggagctcccaaacaaagcaaggagatggccaccaaggagaagctgcagtgtctgaaagatttccacaaggacatcctgaagccctcaccagggaagagcccaggcaagcggcctgaggacgaggctgagggaaaacctccgcagagggagaagtggtctagcaagatcgactttgtgctctctgtggctggcggcttcgtgggcttgggcaacgtctggcgcttcccgtacctctgctacaagaatggtggaggtgcgtttctcataccgtattttattttcctgtttgggagcggcctgcctgtgtttttcttggagatcatcataggccagtacacctctgaagggggcatcacctgctgggaaaagatctgccccttgttctctggtatcggctatgcctccgttgtaattgtgtccctcctgaatgtctactacatcgtcatcctggcctgggccacatactacctgttccagtccttccagaaggagctgccctgggcacactgcaaccacagctggaacacacctcactgcatggaggacaccatgcgcaagaacaagagtgtctggatcaccatcagctccaccaacttcacctcccctgtcatcgagttctgggagcgcaacgtgctgagcttgtcccctggaatcgaccacccaggctctctgaaatgggacctcgctctctgccttcttttagtctggctagtgtgtttcttctgcatctggaagggcgtcaggtccactgggaaggtcgtctacttcacagccacttttccattcgccatgctcctggtgctgctggtccgagggctgacgctgccgggcgcgggcgcaggcatcaagttctatctgtatcctgacatcacccgccttgaggacccacaggtgtggattgacgctgggactcagatattcttctcttatgccatctgcctgggggctatgacctcgctggggagctacaacaagtacaagtataactcgtacagggactgtatgctgctgggatgcctgaacagtggtaccagttttgtgtctggcttcgcaattttttccatcctgggcttcatggcacaagagcaaggggtggacattgctgatgtggctgagtcaggtcctggcctggccttcattgcctacccaaaagctgtgacaatgatgccgctgcccacattttggtccattcttttttttattatgcttctcttgcttggactggatagccagtttgttgaagttgaaggacagatcacatccttggttgatctttacccatccttcctaaggaagggttatcgtcgggaaatcttcatcgccttcgtgtgtagcatcagctacctgctggggctgacgatggtgacggagggtggcatgtatgtgtttcagctctttgactactatgcagctagcggtgtatgccttttgtgggttgcattctttgaatgttttgttattgcctggatatatggaggtgataacctttatgatggtattgaggacatgattggctatcggcccgggccctggatgaagtacagctgggctgtgatcactccagttctctgtgttggatgtttcatcttctcgctcgtcaagtacgtacccctgacctacaacaaaacatacgtgtaccccaactgggccattgggctgggctggagcctggccctttcctccatgctctgcgttcccttggtcatcgtcatccgcctctgccagactgaggggccgttccttgtgagagtcaagtacctgctgaccccaagggaacccaaccgctgggctgtggagcgcgagggagccacaccttacaactctcgcaccgtcatgaacggcgctctcgtgaaaccgacccacatcattgtggagaccatgatgtgagctctctcgggtcgacggggccaacggtttcctgctgtttactaacattagattctcataggaccaggtttacagagctttatatttgcactaggattttttttttttgtaattgtcacagaaaatgtaattgtgggtgtgtgtgcgtgcgtgtgtgtgtgtgtgtgtatcgtgtgtgtgtgttttgttttgatttgggggatattttgtacaaaaagaaaacccacgggaagatgtccgtggagaggcagagctttcatactgaattagatgtattttatgggaatttggtaaatttttctttgtattttttttttttacatataagtatatatacacttagagattgtcatatacttttaccacttgaattgatcttcttgccagcaatagatctcattttcaaaagcaattcttcggtctgtgtagctggcagaaagttctgtccagtaaacgcaggatggaattttcctgggactctacacccatcttaaggtggtataccttccaaatcctggttcagatggaagaaatagcaggagagaggacccattagctggcagacccagggggaagaaaggagggctgtgaggagatacctcattaaacttggcttagtgaagag

SEQ ID NO: 977 - DNA, 433 bp, Homo sapiens
atggacgggtccggggagcagcccagaggcggggggcccaccagctctgagcagatcatgaagacaggggcccttttgcttcaggggatgattgccgccgtggacacagactccccccgagaggtctttttccgagtggcagctgacatgttttctgacggcaacttcaactggggccgggttgtcgcccttttctactttgccagcaaactggtgctcaaggccctgtgcaccaaggtgccggaactgatcagaaccatcatgggctggacattggacttcctccgggagcggctgttgggctggatccaagaccagggtggttgggacggcctcctctcctactttgggacgcccacgtggcagaccgtgaccatctttgtggcgggagtgctcaccgcctcgctcaccatctggaagaagatgggctgag

SEQ ID NO: 978 - DNA, 3100 bp, Homo sapiens
actcgtctctggtaaagtctgagcaggacagggtggctgactggcagatccagaggttcccttggcagtccacgccaggccttcaccatggatcagttccctgaatcagtgacagaaaactttgagtacgatgatttggctgaggcctgttatattggggacatcgtggtctttgggactgtgttcctgtccatattctactccgtcatctttgccattggcctggtgggaaatttgttggtagtgtttgccctcaccaacagcaagaagcccaagagtgtcaccgacatttacctcctgaacctggccttgtctgatctgctgtttgtagccactttgcccttctggactcactatttgataaatgaaaagggcctccacaatgccatgtgcaaattcactaccgccttcttcttcatcggcttttttggaagcatattcttcatcaccgtcatcagcattgataggtacctggccatcgtcctggccgccaactccatgaacaaccggaccgtgcagcatggcgtcaccatcagcctaggcgtctgggcagcagccattttggtggcagcaccccagttcatgttcacaaagcagaaagaaaatgaatgccttggtgactaccccgaggtcctccaggaaatctggcccgtgctccgcaatgtggaaacaaattttcttggcttcctactccccctgctcattatgagttattgctacttcagaatcatccagacgctgttttcctgcaagaaccacaagaaagccaaagccattaaactgatccttctggtggtcatcgtgtttttcctcttctggacaccctacaacgttatgattttcctggagacgcttaagctctatgacttctttcccagttgtgacatgaggaaggatctgaggctggccctcagtgtgactgagacggttgcatttagccattgttgcctgaatcctctcatctatgcatttgctggggagaagttcagaagatacctttaccacctgtatgggaaatgcctggctgtcctgtgtgggcgctcagtccacgttgatttctcctcatctgaatcacaaaggagcaggcatggaagtgttctgagcagcaattttacttaccacacgagtgatggagatgcattgctccttctctgaagggaatcccaaagccttgtgtctacagagaacctggagttcctgaacctgatgctgactagtgaggaaagatttttgttgttatttcttacaggcacaaaatgatggacccaatgcacacaaaacaaccctagagtgttgttgagaattgtgctcaaaatttgaagaatgaacaaattgaactctttgaatgacaaagagtagacatttctcttactgcaaatgtcatcagaactttttggtttgcagatgacaaaaattcaactcagactagtttagttaaatgagggtggtgaatattgttcatattgtggcacaagcaaaagggtgtctgagccctcaaagtgaggggaaaccagggcctgagccaagctagaattccctctctctgactctcaaatcttttagtcattatagatcccccagactttacatgacacagctttatcaccagagagggactgacacccatgtttctctggccccaagggaaaattcccagggaagtgctctgataggccaagtttgtatcaggtgcccatccctggaaggtgctgttatccatggggaagggatatataagatggaagcttccagtccaatctcatggagaagcagaaatacatatttccaagaagttggatgggtgggtactattctgattacacaaaacaaatgccacacatcacccttaccatgtgcctgatccagcctctcccctgattacaccagcctcgtcttcattaagccctcttccatcatgtccccaaacctgcaagggctccccactgcctactgcatcgagtcaaaactcaaatgcttggcttctcatacgtccaccatggggtcctaccaatagattccccattgcctcctccttcccaaaggactccacccatcctatcagcctgtctcttccatatgacctcatgcatctccacctgctcccaggccagtaagggaaatagaaaaaccctgcccccaaataagaagggatggattccaaccccaactccagtagcttgggacaaatcaagcttcagtttcctggtctgtagaagagggataaggtacctttcacatagagatcatcctttccagcatgaggaactagccaccaactcttgcaggtctcaacccttttgtctgcctcttagacttctgctttccacacctgcactgctgtgctgtgcccaagttgtggtgctgacaaagcttggaagagcctgcaggtgccttggccgcgtgcatagcccagacacagaagaggctggttcttacgatggcacccagtgagcactcccaagtctacagagtgatagccttccgtaacccaactctcctggactgccttgaatatcccctcccagtcaccttgtgcaagcccctgcccatctgggaaaataccccatcattcatgctactgccaacctggggagccagggctatgggagcagcttttttttcccccctagaaacgtttggaacaatgtaaaactttaaagctcgaaaacaattgtaataatgctaaagaaaaagtcatccaatctaaccacatcaatattgtcattcctgtattcacccgtccagaccttgttcacactctcacatgtttagagttgcaatcgtaatgtacagatggttttataatctgatttgttttcctcttaacgttagaccacaaatagtgctcgctttctatgtagtttggtaattatcattttagaagactctaccagactgtgtattcattgaagtcagatgtggtaactgttaaattgctgtgtatctgatagctctttggcagtctatatgtttgtataatgaatgagagaataagtcatgttccttcaagatcatgtaccccaatttacttgccattactcaattgataaacatttaacttgtttccaatgtttagcaaatacatattttatagaacttc

SEQ ID NO: 979 - DNA, 2900 bp, Homo sapiens
cgctgggtggtgctggcagccgtgctgatcggcctcctcttggtcttgctggggatcggcttcctggtgtggcatttgcagtaccgggacgtgcgtgtccagaaggtcttcaatggctacatgaggatcacaaatgagaattttgtggatgcctacgagaactccaactccactgagtttgtaagcctggccagcaaggtgaaggacgcgctgaagctgctgtacagcggagtcccattcctgggcccctaccacaaggagtcggctgtgacggccttcagcgagggcagcgtcatcgcctactactggtctgagttcagcatcccgcagcacctggttgaggaggccgagcgcgtcatggccaggagcgcgtagtcatgctgcccccgcgggcgcgctccctgaagtcctttgtggtcacctcagtggtggctttccccacggactccaaaacagtacagaggacccaggacaacagctgcagctttggcctgcacgccgcggtgtggagctgatgcgcttcaccacgccggcttccctgacagcccctaccccgctcatgcccgctgccagtgggctgcggggacgcgacgcagtgctgagctactcgagctgactcgcagcttgactgcgcctcgacgagcgcggcagcgacctggtgacgtgtacaacaccctgagccccatggagccccacgcctggtgagtgtgtggcacctaccctccctcctacaacctgaccttccactccctcccacgaacgtcctgctcatcacactgataaccaacactgacgcggcatcccggctttgaggccaccttcttccagctgcctaggatgagcagctgtggaggccgcttacgtaaagcccaggggacattcaacagcccctactacccaggccactacccacccaacattgactgcacatggaaaattgaggtgcccaacaaccagcatgtgaaggtgcgcttcaaattcttctacctgctggagcccggcgtgcctgcgggcacctgccccaaggactacgtggagatcaatggggagaaatactgcggagagaggtcccagttcgtcgtcaccagcaacagcaacaagatcacagttcgcttccactcagatcagtcctacaccgacaccggcttcttagctgaatacctctcctacgactccagtgacccatgcccggggcagttcacgtgccgcacggggcggtgtatccggaaggagctgcgctgtgatggctgggcgactgcaccgaccacagcgatgagctcaactgcagttgcgacgccggccaccagttcacgtgcaagagcaagttctgcaagctcttctgggtctgcgacagtgtgaacgagtgcggagacaacagcgacgagcagggttgcatttgtccggacccagaccttcaggtgttccaatgggaagtgcctctcgaaaagccagcagtgcaatgggaaggacgactgtggggacgggtccgacgaggcctcctgccccaaggtgaacgtcgtcacttgtaccaaacacacctaccgctgcctcaatgggctctgcttgagcaagggcaaccctgagtgtgacgggaaggaggactgtagcgacggctcagatgagaaggactgcgactgtgggctgcggtcattcacgagacaggctcgtgttgttgggggcacggatgcggatgagggcgagtggccctggcaggtaagcctgcatgctctgggccagggccacatctgcggtgcttccctcatctctcccaactggctggtctctgccgcacactgctacatcgatgacagaggattcaggtactcagaccccacgcaggacggccttcctgggcttgcacgaccagagccagcgcaggccctggggtgcaggagcgcaggctcaagcgcatcatctcccaccccttcttcaatgacttcaccttcgactatgacatcgcgctgctggagctggagaaaccggcagagtacagctccatggtgcggcccatctgcctgccggacgcctgccatgtcttccctgccggcaaggccatctgggtcacgggctggggacacacccagtatggaggcactggcgcgctgatcctgcaaaagggtgagatccgcgtcatcaaccagaccacctgcgagaacctcctgccgcagcagatcacgccgcgcatgatgtgcgtgggcttcctcagcggcggcgtggactcctgccagggtgattccgggggacccctgtccagcgtggaggcggatgggcggatcttccaggccggtgtggtgagctggggagacgctgcgctcagaggaacaagccaggcgtgtacacaaggctccctctgtttcgggaatggatcaaagagaacactggggtataggggccggggccacccaaatgtgtacacctgcggggccacccatcgtccaccccagtgtgcacgcctgcaggctggagactcgcgcaccgtgacctgcaccagcgccccagaacatacactgtgaactcatctccaggctcaaatctgctagaaaacctctcgcttcctcagcctccaaagtggagctgggagggtagaaggggaggaacactggtggttctactgacccaactggggcaaggtttgaagcacagctccggcagcccaagtgggcgaggacgcgtttgtgcatactgccctgctctatacacggaagacctggatctctagtgagtgtgactgccggatctggctgtggtccttggccacgcttcttgaggaagcccaggctcggaggaccctggaaaacagacgggtctgagactgaaaatggtttaccagctcccaggtgacttcagtgtgtgtattgtgtaaatgagtaaaacattttatttctttttaaaaaaaaaaa

SEQ ID NO: 980 - DNA, 2097 bp, Homo sapiens
gtttcctgggagcggccgtggttgtggtggtggtgggacagtgtgcagccatgaaagaaggtgcaaaggaatctccaaagaaagcctgaccagcgtaaaaagttgggaggctttgtccttgtcacttgtccactaaactcctcccctccctgttatcctggttgaccctgggcatctctggggacagtaggcaggtgattgggaaagttaatgggattgaggggctgagggctggcagggggcaaaaagactggcctttcaaggggtgcagcattggtaggaactctgtttggttctgggctttagggtctcctaagggaggagactgaaaaggtctggaaatgctgctgctgctgtggtcactgtatattttgcaattgggtctgtggacaggaaggggccgcatgacccagttaggaaactagtctttgtactcaaccagatccctttaagttgtcagtctgcagcgatgggggcagtatatttcagggggacctctgatgctgctgaccctggagatagactagagttctcagcctaggtgtgtccatggcgtcaggaaacccttggtcctctactctcatgcgtgtgtccgccctcactctccaggtcctcccgacggccatgaacactacatcttctgcagcacccccctcactaggtgtagagttcatctctctgctggctatcatcctgctgtcagtggcgctggctgtggggcttcccggcaacagctttgtggtgtggagtatcctgaaaaggatgcagaagcgctctgtcactgccctgatggtgctgaacctggccctggccgacctggccgtattgctcactgctccctttttccttcacttcctggcccaaggcacctggagttttggactggctggttgccgcctgtgtcactatgtctgcggagtcagcatgtacgccagcgtcctgcttatcacggccatgagtctagaccgctcactggcggtggcccgcccctttgtgtcccagaagctacgcaccaaggcgatggcccggcgggtgctggcaggcatctgggtgttgtcctttctgctggccacacccgtcctcgcgtaccgcacagtagtgccctggaaaacgaacatgagcctgtgcttcccgcggtaccccagcgaagggcaccgggccttccatctaatcttcgaggctgtcacgggcttcctgctgcccttcctggctgtggtggccagctactcggacatagggcgtcggctacaggcccggcgcttccgccgcagccgccgcaccggccgcctggtggtgctcatcatcctgaccttcgccgccttctggctgccctaccacgtggtgaacctggctgaggcgggccgcgcgctggccggccaggccgccgggttagggctcgtggggaagcggctgagcctggcccgcaacgtgctcatcgcactcgccttcctgagcagcagcgtgaaccccgtgctgtacgcgtgcgccggcggcggcctgctgcgctcggcgggcgtgggcttcgtcgccaagctgctggagggcacgggctccgaggcgtccagcacgcgccgcgggggcagcctgggccagaccgctaggagcggccccgccgctctggagcccggcccttccgagagcctcactgcctccagccctctcaagttaaacgaactgaactaggcctggtggaaggaggcgcactttcctcctggcagaatcgtagctctgagccagttcagtacctggaggaggagcaggggcgtggagggcgtggagggcgtgggagcgtgggaggcgggagtggagtggaagaagagggagagatggagcaaagtgagggccgagtgagagcgtgctccagcctggctcccacaggcagctttaaccattaaaactgaagtctgaaatttggtcaaccttgtgagtggggtacatgtgctgtgggtatcggggtgctcgtgggcgccctggtggggcccctctcggtagttgagagtcacgtcctttagttccccatgatttacaattttggaagggacacaaagaaacatagactgcccccatcccagatgattccgagtacatagtctgcag

SEQ ID NO: 981 - DNA, 12783 bp, Homo sapiens
atttccgggtccgggccgagcgggcgcacgcgcgggagcgggactcggcggcatggcgggctccggagccggtgtgcgttgctccctgctgcggctgcaggagaccttgtccgctgcggaccgctgcggtgctgccctggccggtcatcaactgatccgcggcctggggcaggaatgcgtcctgagcagcagccccgcggtgctggcattacagacatctttagttttttccagagatttcggtttgcttgtatttgtccggaagtcactcaacagtattgaatttcgtgaatgtagagaagaaatcctaaagtttttatgtattttcttagaaaaaatgggccagaagatcgcaccttactctgttgaaattaagaacacttgtaccagtgtttatacaaaagatagagctgctaaatgtaaaattccagccctggaccttcttattaagttacttcagacttttagaagttctagactcatggatgaatttaaaattggagaattatttagtaaattctatggagaacttgcattgaaaaaaaaaataccagatacagttttagaaaaagtatatgagctcctaggattattgggtgaagttcatcctagtgagatgataaataatgcagaaaacctgttccgcgcttttctgggtgaacttaagacccagatgacatcagcagtaagagagcccaaactacctgttctggcaggatgtctgaaggggttgtcctcacttctgtgcaacttcactaagtccatggaagaagatccccagacttcaagggagatttttaattttgtactaaaggcaattcgtcctcagattgatctgaagagatatgctgtgccctcagctggcttgcgcctatttgccctgcatgcatctcagtttagcacctgccttctggacaactacgtgtctctatttgaagtcttgttaaagtggtgtgcccacacaaatgtagaattgaaaaaagctgcactttcagccctggaatcctttctgaaacaggtttctaatatggtggcgaaaaatgcagaaatgcataaaaataaactgcagtactttatggagcagttttatggaatcatcagaaatgtggattcgaacaacaaggagttatctattgctatccgtggatatggactttttgcaggaccgtgcaaggttataaacgcaaaagatgttgacttcatgtacgttgagctcattcagcgctgcaagcagatgttcctcacccagacagacactggtgactaccgtgtttatcagatgccaagcttcctccagtctgttgcaagcgtcttgctgtaccttgacacagttcctgaggtgtatactccagttctggagcacctcgtggtgatgcagatagacagtttcccacagtacagtccaaaaatgcagctggtgtgttgcagagccatagtgaaggtgttcctagctttggcagcaaaagggccagttctcaggaattgcattagtactgtggtgcatcagggtttaatcagaatatgttctaaaccagtggtccttccaaagggccctgagtctgaatctgaagaccaccgtgcttcaggggaagtcagaactggcaaatggaaggtgcccacatacaaagactacgtggatctcttcagacatctcctgagctctgaccagatgatggattctattttagcagatgaagcatttttctctgtgaattcctccagtgaaagtctgaatcatttactttatgatgaatttgtaaaatccgttttgaagattgttgagaaattggatcttacacttgaaatacagactgttggggaacaagagaatggagatgaggcgcctggtgtttggatgatcccaacttcagatccagcggctaacttgcatccagctaaacctaaagatttttcggctttcattaacctggtggaattttgcagagagattctccctgagaaacaagcagaattttttgaaccatgggtgtactcattttcatatgaattaattttgcaatctacaaggttgcccctcatcagtggtttctacaaattgctttctattacagtaagaaatgccaagaaaataaaatatttcgagggagttagtccaaagagtctgaaacactctcctgaagacccagaaaagtattcttgctttgctttatttgtgaaatttggcaaagaggtggcagttaaaatgaagcagtacaaagatgaacttttggcctcttgtttgacctttcttctgtccttgccacacaacatcattgaactcgatgttagagcctacgttcctgcactgcagatggctttcaaactgggcctgagctatacccccttggcagaagtaggcctgaatgctctagaagaatggtcaatttatattgacagacatgtaatgcagccttattacaaagacattctcccctgcctggatggatacctgaagacttcagccttgtcagatgagaccaagaataactgggaagtgtcagctctttctcgggctgcccagaaaggatttaataaagtggtgttaaagcatctgaagaagacaaagaacctttcatcaaacgaagcaatatccttagaagaaataagaattagagtagtacaaatgcttggatctctaggaggacaaataaacaaaaatcttctgacagtcacgtcctcagatgagatgatgaagagctatgtggcctgggacagagagaagcggctgagctttgcagtgccctttagagagatgaaacctgtcattttcctggatgtgttcctgcctcgagtcacagaattagcgctcacagccagtgacagacaaactaaagttgcagcctgtgaacttttacatagcatggttatgtttatgttgggcaaagccacgcagatgccagaagggggacagggagccccacccatgtaccagctctataagcggacgtttcctgtgctgcttcgacttgcgtgtgatgttgatcaggtgacaaggcaactgtatgagccactagttatgcagctgattcactggttcactaacaacaagaaatttgaaagtcaggatactgtttccttactagaagctatattggatggaattgtggaccctgttgacagtactttaagagatttttgtggtcggtgtattcgagaattccttaaatggtccattaagcaaataacaccacagcagcaggagaagagtccagtaaacaccaaatcgcttttcaagcgactttatagccttgcgcttcaccccaatgctttcaagaggctgggagcatcacttgcctttaataatatctacagggaattcagggaagaagagtctctggtggaacagtttgtgtttgaagccttggtgatatacatggagagtctggccttagcacatgcagatgagaagtccttaggtacaattcaacagtgttgtgatgccattgatcacctatgccgcatcattgaaaagaagcatgtttctttaaataaagcaaagaaacgacgtttgccgcgaggatttccaccttccgcatcattgtgtttattggatctggtcaagtggcttttagctcattgtgggaggccccagacagaatgtcgacacaaatccattgaactcttttataaattcgttcctttattgccaggcaacagatcccctaatttgtggctgaaagatgttctcaaggaagaaggtgtctcttttctcatcaacacctttgaggggggtggctgtggccagccctcgggcatcctggcccagcccaccctcttgtaccttcgggggccattcagcctgcaggccacgctatgctggctggacctgctcctggccgcgttggagtgctacaacacgttcattggcgagagaactgtaggagcgctccaggtcctaggtactgaagcccagtcttcacttttgaaagcagtggctttcttcttagaaagcattgccatgcatgacattatagcagcagaaaagtgctttggcactggggcagcaggtaacagaacaagcccacaagagggagaaaggtacaactacagcaaatgcaccgttgtggtccggattatggagtttaccacgactctgctaaacacctccccggaaggatggaagctcctgaagaaggacttgtgtaatacacacctgatgagagtcctggtgcagacgctgtgtgagcccgcaagcataggtttcaacatcggagacgtccaggttatggctcatcttcctgatgtttgtgtgaatctgatgaaagctctaaagatgtccccatacaaagatatcctagagacccatctgagagagaaaataacagcacagagcattgaggagctttgtgccgtcaacttgtatggccctgacgcgcaagtggacaggagcaggctggctgctgttgtgtctgcctgtaaacagcttcacagagctgggcttctgcataatatattaccgtctcagtccacagatttgcatcattctgttggcacagaacttctttccctggtttataaaggcattgcccctggagatgagagacagtgtctgccttctctagacctcagttgtaagcagctggccagcggacttctggagttagcctttgcttttggaggactgtgtgagcgccttgtgagtcttctcctgaacccagcggtgctgtccacggcgtccttgggcagctcacagggcagcgtcatccacttctcccatggggagtatttctatagcttgttctcagaaacgatcaacacggaattattgaaaaatctggatcttgctgtattggagctcatgcagtcttcagtggataataccaaaatggtgagtgccgttttgaacggcatgttagaccagagcttcagggagcgagcaaaccagaaacaccaaggactgaaacttgcgactacaattctgcaacactggaagaagtgtgattcatggtgggccaaagattcccctctcgaaactaaaatggcagtgctggccttactggcaaaaattttacagattgattcatctgtatcttttaatacaagtcatggttcattccctgaagtctttacaacatatattagtctacttgctgacacaaagctggatctacatttaaagggccaagctgtcactcttcttccattcttcaccagcctcactggaggcagtctggaggaacttagacgtgttctggagcagctcatcgttgctcacttccccatgcagtccagggaatttcctccaggaactccgcggttcaataattatgtggactgcatgaaaaagtttctagatgcattggaattatctcaaagccctatgttgttggaattgatgacagaagttctttgtcgggaacagcagcatgtcatggaagaattatttcaatccagtttcaggaggattgccagaaggggttcatgtgtcacacaagtaggccttctggaaagcgtgtatgaaatgttcaggaaggatgacccccgcctaagtttcacacgccagtcctttgtggaccgctccctcctcactctgctgtggcactgtagcctggatgctttgagagaattcttcagcacaattgtggtggatgccattgatgtgttgaagtccaggtttacaaagctaaatgaatctacctttgatactcaaatcaccaagaagatgggctactataagattctagacgtgatgtattctcgccttcccaaagatgatgttcatgctaaggaatcaaaaattaatcaagttttccatggctcgtgtattacagaaggaaatgaacttacaaagacattgattaaattgtgctacgatgcatttacagagaacatggcaggagagaatcagctgctggagaggagaagactttaccattgtgcagcatacaactgcgccatatctgtcatctgctgtgtcttcaatgagttaaaattttaccaaggttttctgtttagtgaaaaaccagaaaagaacttgcttatttttgaaaatctgatcgacctgaagcgccgctataattttcctgtagaagttgaggttcctatggaaagaaagaaaaagtacattgaaattaggaaagaagccagagaagcagcaaatggggattcagatggtccttcctatatgtcttccctgtcatatttggcagacagtaccctgagtgaggaaatgagtcaatttgatttctcaaccggagttcagagctattcatacagctcccaagaccctagacctgccactggtcgttttcggagacgggagcagcgggaccccacggtgcatgatgatgtgctggagctggagatggacgagctcaatcggcatgagtgcatggcgcccctgacggccctggtcaagcacatgcacagaagcctgggcccgcctcaaggagaagaggattcagtgccaagagatcttccttcttggatgaaattcctccatggcaaactgggaaatccaatagtaccattaaatatccgtctcttcttagccaagcttgttattaatacagaagaggtctttcgcccttacgcgaagcactggcttagccccttgctgcagctggctgcttctgaaaacaatggaggagaaggaattcactacatggtggttgagatagtggccactattctttcatggacaggcttggccactccaacaggggtccctaaagatgaagtgttagcaaatcgattgcttaatttcctaatgaaacatgtctttcatccaaaaagagctgtgtttagacacaaccttgaaattataaagacccttgtcgagtgctggaaggattgtttatccatcccttataggttaatatttgaaaagttttccggtaaagatcctaattctaaagacaactcagtagggattcaattgctaggcatcgtgatggccaatgacctgcctccctatgacccacagtgtggcatccagagtagcgaatacttccaggctttggtgaataatatgtcctttgtaagatataaagaagtgtatgccgctgcagcagaagttctaggacttatacttcgatatgttatggagagaaaaaacatactggaggagtctctgtgtgaactggttgcgaaacaattgaagcaacatcagaatactatggaggacaagtttattgtgtgcttgaacaaagtgaccaagagcttccctcctcttgcagacaggttcatgaatgctgtgttctttctgctgccaaaatttcatggagtgttgaaaacactctgtctggaggtggtactttgtcgtgtggagggaatgacagagctgtacttccagttaaagagcaaggacttcgttcaagtcatgagacatagagatgatgaaagacaaaaagtatgtttggacataatttataagatgatgccaaagttaaaaccagtagaactccgagaacttctgaaccccgttgtggaattcgtttcccatccttctacaacatgtagggaacaaatgtataatattctcatgtggattcatgataattacagagatccagaaagtgagacagataatgactcccaggaaatatttaagttggcaaaagatgtgctgattcaaggattgatcgatgagaaccctggacttcaattaattattcgaaatttctggagccatgaaactaggttaccttcaaataccttggaccggttgctggcactaaattccttatattctcctaagatagaagtgcactttttaagtttagcaacaaattttctgctcgaaatgaccagcatgagcccagattatccaaaccccatgttcgagcatcctctgtcagaatgcgaatttcaggaatataccattgattctgattggcgtttccgaagtactgttctcactccgatgtttgtggagacccaggcctcccagggcactctccagacccgtacccaggaagggtccctctcagctcgctggccagtggcagggcagataagggccacccagcagcagcatgacttcacactgacacagactgcagatggaagaagctcatttgattggctgaccgggagcagcactgacccgctggtcgaccacaccagtccctcatctgactccttgctgtttgcccacaagaggagtgaaaggttacagagagcacccttgaagtcagtggggcctgattttgggaaaaaaaggctgggccttccaggggacgaggtggataacaaagtgaaaggtgcggccggccggacggacctactacgactgcgcagacggtttatgagggaccaggagaagctcagtttgatgtatgccagaaaaggcgttgctgagcaaaaacgagagaaggaaatcaagagtgagttaaaaatgaagcaggatgcccaggtcgttctgtacagaagctaccggcacggagaccttcctgacattcagatcaagcacagcagcctcatcaccccgttacaggccgtggcccagagggacccaataattgcaaaacagctctttagcagcttgttttctggaattttgaaagagatggataaatttaagacactgtctgaaaaaaacaacatcactcaaaagttgcttcaagacttcaatcgttttcttaataccaccttctctttctttccaccctttgtctcttgtattcaggacattagctgtcagcacgcagccctgctgagcctcgacccagcggctgttagcgctggttgcctggccagcctacagcagcccgtgggcatccgcctgctagaggaggctctgctccgcctgctgcctgctgagctgcctgccaagcgagtccgtgggaaggcccgcctccctcctgatgtcctcagatgggtggagcttgctaagctgtatagatcaattggagaatacgacgtcctccgtgggatttttaccagtgagataggaacaaagcaaatcactcagagtgcattattagcagaagccagaagtgattattctgaagctgctaagcagtatgatgaggctctcaataaacaagactgggtagatggtgagcccacagaagccgagaaggatttttgggaacttgcatcccttgactgttacaaccaccttgctgagtggaaatcacttgaatactgttctacagccagtatagacagtgagaaccccccagacctaaataaaatctggagtgaaccattttatcaggaaacatatctaccttacatgatccgcagcaagctgaagctgctgctccagggagaggctgaccagtccctgctgacatttattgacaaagctatgcacggggagctccagaaggcgattctagagcttcattacagtcaagagctgagtctgctttacctcctgcaagatgatgttgacagagccaaatattacattcaaaatggcattcagagttttatgcagaattattctagtattgatgtcctcttacaccaaagtagactcaccaaattgcagtctgtacaggctttaacagaaattcaggagttcatcagctttataagcaaacaaggcaatttatcatctcaagttccccttaagagacttctgaacacctggacaaacagatatccagatgctaaaatggacccaatgaacatctgggatgacatcatcacaaatcgatgtttctttctcagcaaaatagaggagaagcttacccctcttccagaagataatagtatgaatgtggatcaagatggagaccccagtgacaggatggaagtgcaagagcaggaagaagatatcagctccctgatcaggagttgcaagttttccatgaaaatgaagatgatagacagtgcccggaagcagaacaatttctcacttgctatgaaactactgaaggagctgcataaagagtcaaaaaccagagacgattggctggtgagctgggtgcagagctactgccgcctgagccactgccggagccggtcccagggctgctctgagcaggtgctcactgtgctgaaaacagtctctttgttggatgagaacaacgtgtcaagctacttaagcaaaaatattctggctttccgtgaccagaacattctcttgggtacaacttacaggatcatagcgaatgctctcagcagtgagccagcctgccttgctgaaatcgaggaggacaaggctagaagaatcttagagctttctggatccagttcagaggattcagagaaggtgatcgcgggtctgtaccagagagcattccagcacctctctgaggctgtgcaggcggctgaggaggaggcccagcctccctcctggagctgtgggcctgcagctggggtgattgatgcttacatgacgctggcagatttctgtgaccaacagctgcgcaaggaggaagagaatgcatcagttattgattctgcagaactgcaggcgtatccagcacttgtggtggagaaaatgttgaaagctttaaaattaaattccaatgaagccagattgaagtttcctagattacttcagattatagaacggtatccagaggagactttgagcctcatgacaaaagagatctcttccgttccctgctggcagttcatcagctggatcagccacatggtggccttactggacaaagaccaagccgttgctgttcagcactctgtggaagaaatcactgataactacccgcaggctattgtttatcccttcatcataagcagcgaaagctattccttcaaggatacttctactggtcataagaataaggagtttgtggcaaggattaaaagtaagttggatcaaggaggagtgattcaagattttattaatgccttagatcagctctctaatcctgaactgctctttaaggattggagcaatgatgtaagagctgaactagcaaaaacccctgtaaataaaaaaaacattgaaaaaatgtatgaaagaatgtatgcagccttgggtgacccaaaggctccaggcctgggggcctttagaaggaagtttattcagacttttggaaaagaatttgataaacattttgggaaaggaggttctaaactactgagaatgaagctcagtgacttcaacgacattaccaacatgctacttttaaaaatgaacaaagactcaaagccccctgggaatctgaaagaatgttcaccctggatgagcgacttcaaagtggagttcctgagaaatgagctggagattcccggtcagtatgacggtaggggaaagccattgccagagtaccacgtgcgaatcgccgggtttgatgagcgggtgacagtcatggcgtctctgcgaaggcccaagcgcatcatcatccgtggccatgacgagagggaacaccctttcctggtgaagggtggcgaggacctgcggcaggaccagcgcgtggagcagctcttccaggtcatgaatgggatcctggcccaagactccgcctgcagccagagggccctgcagctgaggacctatagcgttgtgcccatgacctccagtgatcccagggcaccgccgtgtgaatataaagattggctgacaaaaatgtcaggaaaacatgatgttggagcttacatgctaatgtataagggcgctaatcgtactgaaacagtcacgtcttttagaaaacgagaaagtaaagtgcctgctgatctcttaaagcgggccttcgtgaggatgagtacaagccctgaggctttcctggcgctccgctcccacttcgccagctctcacgctctgatatgcatcagccactggatcctcgggattggagacagacatctgaacaactttatggtggccatggagactggcggcgtgatcgggatcgactttgggcatgcgtttggatccgctacacagtttctgccagtccctgagttgatgccttttcggctaactcgccagtttatcaatctgatgttaccaatgaaagaaacgggccttatgtacagcatcatggtacacgcactccgggccttccgctcagaccctggcctgctcaccaacaccatggatgtgtttgtcaaggagccctcctttgattggaaaaattttgaacagaaaatgctgaaaaaaggagggtcatggattcaagaaataaatgttgctgaaaaaaattggtacccccgacagaaaatatgttacgctaagagaaagttagcaggtgccaatccagcagtcattacttgtgatgagctactcctgggtcatgagaaggcccctgccttcagagactatgtggctgtggcacgaggaagcaaagatcacaacattcgtgcccaagaaccagagagtgggctttcagaagagactcaagtgaagtgcctgatggaccaggcaacagaccccaacatccttggcagaacctgggaaggatgggagccctggatgtgaggtctgtgggagtctgcagatagaaagcattacattgtttaaagaatctactatacttggttggcagcattccatgagctgattttcctgaaacactaaagagaaatgtcttttgtgctacagtttcgtagcatgagtttaaatcaagattatgatgagtaaatgtgtatgggttaaatcaaagataaggttatagtaacatcaaagattaggtgaggtttatagaaagatagatatccaggcttaccaaagtattaagtcaagaatataatatgtgatcagctttcaaagcatttacaagtgctgcaagttagtgaaacagctgtctccgtaaatggaggaaatgtggggaagccttggaatgcccttctggttctggcacattggaaagcacactcagaaggcttcatcaccaagattttgggagagtaaagcta

SEQ ID NO: 982 - DNA, 1610 bp, Homo sapiens
ggcggtgctctacgtcttcaccgctggagatctgctgccccgggcaggtccccgtttcctcacgcggctcttcgaaggctctggggaggcccgagggggcggccgctctagggaagggaccatggagctccgaactacccctcagctgaaagtggtggggcagggccgcggcaatggagacccggggggtgggatggagaaggacggtccggaatgggacctttgacagcagaccctacaacctgctgcccttccctgtccctttccaccccccacccaccctccagaggtcctcccgacggccatgaacactacatcttctgcagcacccccctcactaggtgtagagttcatctctctgctggctatcatcctgctgtcagtggcgctggctgtggggcttcccggcaacagctttgtggtgtggagtatcctgaaaaggatgcagaagcgctctgtcactgccctgatggtgctgaacctggccctggccgacctggccgtattgctcactgctccctttttccttcacttcctggcccaaggcacctggagttttggactggctggttgccgcctgtgtcactatgtctgcggagtcagcatgtacgccagcgtcctgcttatcacggccatgagtctagaccgctcactggcggtggcccgcccctttgtgtcccagaagctacgcaccaaggcgatggcccggcgggtgctggcaggcatctgggtgttgtcctttctgctggccacacccgtcctcgcgtaccgcacagtagtgccctggaaaacgaacatgagcctgtgcttcccgcggtaccccagcgaagggcaccgggccttccatctaatcttcgaggctgtcacgggcttcctgctgcccttcctggctgtggtggccagctactcggacatagggcgtcggctacaggcccggcgcttccgccgcagccgccgcaccggccgcctggtggtgctcatcatcctgaccttcgccgccttctggctgccctaccacgtggtgaacctggctgaggcgggccgcgcgctggccggccaggccgccgggttagggctcgtggggaagcggctgagcctggcccgcaacgtgctcatcgtactcgccttcctgagcagcagcgtgaaccccgtgctgtacgcgtgcgccggcggcggcctcgtgcgctcggcgggcgtgggcttcgtcgccaagctgctggagggcacgggctccgaggcgtccagcacgcgccgcgggggcagcctgggccagaccgctaggagcggccccgccgctctggagcccggcccttccgagagcctcactgcctccagccctctcaagttaaacgaactgaactaggcctggtggaaggaggcgcactttcctcctggcagaatgctagctctgagccagttcagtacctggaggaggagcaggggcgtggagggcgtggagggcgtgggagcgtgggaggcgggagtggagtggaagaagagggagagatggagcaaagtgagggccgagtgagagcgtgctccagcctggctcccacaggcagctttaaccattaaaactgaagtctgaaatttggtcaaaaaaaaaaaaa

SEQ ID NO: 983 - DNA, 608 bp, Homo sapiens
gcacgatggaccccaaacagaccaccctcctgtgtcttgtgctctgtctgggccagaggattcaggcacaggaaggggactttcccatgcctttcatatctgccaaatcgagtcctgtgattcccttggatggatctgtgaaaatccagtgccaggccattcgtgaagcttacctgacccagctgatgatcataaaaaactccacgtaccgagagataggcagaagactgaagttttggaatgagactgatcctgagttcgtcattgaccacatggacgcaaacaaggcagggcgctatcagtgccaatataggatagggcactacagattccggtacagtgacaccctggagctggtagtgacagactccatccaccaagattacacgacgcagaacttgatccgcatggccgtggcaggactggtcctcgtggctctcttggccatactggttgaaaattggcacagccatacggcactgaacaaggaagcctcggcagatgtggctgaaccgagctggagccaacagatgtgtcagccaggattgacctttgcacgaacaccaagtgtctgcaagtaaacacctggaggtgaaggcagagaggag

SEQ ID NO: 984 - DNA, 13509 bp, Homo sapiens
ggggcatttccgggtccgggccgagcgggcgcacgcgcgggagcgggactcggcggcatggcgggctccggagccggtgtgcgttgctccctgctgcggctgcaggagaccttgtccgctgcggaccgctgcggtgctgccctggccggtcatcaactgatccgcggcctggggcaggaatgcgtcctgagcagcagccccgcggtgctggcattacagacatctttagttttttccagagatttcggtttgcttgtatttgtccggaagtcactcaacagtattgaatttcgtgaatgtagagaagaaatcctaaagtttttatgtattttcttagaaaaaatgggccagaagatcgcaccttactctgttgaaattaagaacacttgtaccagtgtttatacaaaagatagagctgctaaatgtaaaattccagccctggaccttcttattaagttacttcagacttttagaagttctagactcatggatgaatttaaaattggagaattatttagtaaattctatggagaacttgcattgaaaaaaaaaataccagatacagttttagaaaaagtatatgagctcctaggattattgggtgaagttcatcctagtgagatgataaataatgcagaaaacctgttccgcgcttttctgggtgaacttaagacccagatgacatcagcagtaagagagcccaaactacctgttctggcaggatgtctgaaggggttgtcctcacttctgtgcaacttcactaagtccatggaagaagatccccagacttcaagggagatttttaattttgtactaaaggcaattcgtcctcagattgatctgaagagatatgctgtgccctcagctggcttgcgcctatttgccctgcatgcatctcagtttagcacctgccttctggacaactacgtgtctctatttgaagtcttgttaaagtggtgtgcccacacaaatgtagaattgaaaaaagctgcactttcagccctggaatcctttctgaaacaggtttctaatatggtggcgaaaaatgcagaaatgcataaaaataaactgcagtactttatggagcagttttatggaatcatcagaaatgtggattcgaacaacaaggagttatctattgctatccgtggatatggactttttgcaggaccgtgcaaggttataaacgcaaaagatgttgacttcatgtacgttgagctcattcagcgctgcaagcagatgttcctcacccagacagacactggtgacgaccgtgtttatcagatgccaagcttcctccagtctgttgcaagcgtcttgctgtaccttgacacagttcctgaggtgtatactccagttctggagcacctcgtggtgatgcagatagacagtttcccacagtacagtccaaaaatgcagctggtgtgttgcagagccatagtgaaggtgttcctagctttggcagcaaaagggccagttctcaggaattgcattagtactgtggtgcatcagggtttaatcagaatatgttctaaaccagtggtccttccaaagggccctgagtctgaatctgaagaccaccgtgcttcaggggaagtcagaactggcaaatggaaggtgcccacatacaaagactacgtggatctcttcagacatctcctgagctctgaccagatgatggattctattttagcagatgaagcatttttctctgtgaattcctccagtgaaagtctgaatcatttactttatgatgaatttgtaaaatccgttttgaagattgttgagaaattggatcttacacttgaaatacagactgttggggaacaagagaatggagatgaggcgcctggtgtttggatgatcccaacttcagatccagcggctaacttgcatccagctaaacctaaagatttttcggctttcattaacctggtggaattttgcagagagattctccctgagaaacaagcagaattttttgaaccatgggtgtactcattttcatatgaattaattttgcaatctacaaggttgcccctcatcagtggtttctacaaattgctttctattacagtaagaaatgccaagaaaataaaatatttcgagggagttagtccaaagagtctgaaacactctcctgaagacccagaaaagtattcttgctttgctttatttgtgaaatttggcaaagaggtggcagttaaaatgaagcagtacaaagatgaacttttggcctcttgtttgacctttcttctgtccttgccacacaacatcattgaactcgatgttagagcctacgttcctgcactgcagatggctttcaaactgggcctgagctatacccccttggcagaagtaggcctgaatgctctagaagaatggtcaatttatattgacagacatgtaatgcagccttattacaaagacattctcccctgcctggatggatacctgaagacttcagccttgtcagatgagaccaagaataactgggaagtgtcagctctttctcgggctgcccagaaaggatttaataaagtggtgttaaagcatctgaagaagacaaagaacctttcatcaaacgaagcaatatccttagaagaaataagaattagagtagtacaaatgcttggatctctaggaggacaaataaacaaaaatcttctgacagtcacgtcctcagatgagatgatgaagagctatgtggcctgggacagagagaagcggctgagctttgcagtgccctttagagagatgaaacctgtcattttcctggatgtgttcctgcctcgagtcacagaattagcgctcacagccagtgacagacaaactaaagttgcagcctgtgaacttttacatagcatggttatgtttatgttgggcaaagccacgcagatgccagaagggggacagggagccccacccatgtaccagctctataagcggacgtttcctgtgctgcttcgacttgcgtgtgatgttgatcaggtgacaaggcaactgtatgagccactagttatgcagctgattcactggttcactaacaacaagaaatttgaaagtcaggatactgttgccttactagaagctatattggatggaattgtggaccctgttgacagtactttaagagatttttgtggtcggtgtattcgagaattccttaaatggtccattaagcaaataacaccacagcagcaggagaagagtccagtaaacaccaaatcgcttttcaagcgactttatagccttgcgcttcaccccaatgctttcaagaggctgggagcatcacttgcctttaataatatctacagggaattcagggaagaagagtctctggtggaacagtttgtgtttgaagccttggtgatatacatggagagtctggccttagcacatgcagatgagaagtccttaggtacaattcaacagtgttgtgatgccattgatcacctatgccgcatcattgaaaagaagcatgtttctttaaataaagcaaagaaacgacgtttgccgcgaggatttccaccttccgcatcattgtgtttattggatctggtcaagtggcttttagctcattgtgggaggccccagacagaatgtcgacacaaatccattgaactcttttataaattcgttcctttattgccaggcaacagatcccctaatttgtggctgaaagatgttctcaaggaagaaggtgtctcttttctcatcaacacctttgaggggggtggctgtggccagccctcgggcatcctggcccagcccaccctcttgtaccttcgggggccattcagcctgcaggccacgctatgctggctggacctgctcctggccgcgttggagtgctacaacacgttcattggcgagagaactgtaggagcgctccaggtcctaggtactgaagcccagtcttcacttttgaaagcagtggctttcttcttagaaagcattgccatgcatgacattatagcagcagaaaagtgctttggcactggggcagcaggtaacagaacaagcccacaagagggagaaaggtacaactacagcaaatgcaccgttgtggtccggattatggagtttaccacgactctgctaaacacctccccggaaggatggaagctcctgaagaaggacttgtgtaatacacacctgatgagagtcctggtgcagacgctgtgtgagcccgcaagcataggtttcaacatcggagacgtccaggttatggctcatcttcctgatgtttgtgtgaatctgatgaaagctctaaagatgtccccatacaaagatatcctagagacccatctgagagagaaaataacagcacagagcattgaggagctttgtgccgtcaacttgtatggccctgacgcgcaagtggacaggagcaggctggctgctgttgtgtctgcctgtaaacagcttcacagagctgggcttctgcataatatattaccgtctcagtccacagatttgcatcattctgttggcacagaacttctttccctggtttataaaggcattgcccctggagatgagagacagtgtctgccttctctagacctcagttgtaagcagctggccagcggacttctggagttagcctttgcttttggaggactgtgtgagcgccttgtgagtcttctcctgaacccagcggtgctgtccacggcgtccttgggcagctcacagggcagcgtcatccacttctcccatggggagtatttctatagcttgttctcagaaacgatcaacacggaattattgaaaaatctggatcttgctgtattggagctcatgcagtcttcagtggataataccaaaatggtgagtgccgttttgaacggcatgttagaccagagcttcagggagcgagcaaaccagaaacaccaaggactgaaacttgcgactacaattctgcaacactggaagaagtgtgattcatggtgggccaaagattcccctctcgaaactaaaatggcagtgctggccttactggcaaaaattttacagattgattcatctgtatcttttaatacaagtcatggttcattccctgaagtctttacaacatatattagtctacttgctgacacaaagctggatctacatttaaagggccaagctgtcactcttcttccattcttcaccagcctcactggaggcagtctggaggaacttagacgtgttctggagcagctcatcgttgctcacttccccatgcagtccagggaatttcctccaggaactccgcggttcaataattatgtggactgcatgaaaaagtttctagatgcattggaattatctcaaagccctatgttgttggaattgatgacagaagttctttgtcgggaacagcagcatgtcatggaagaattatttcaatccagtttcaggaggattgccagaaggggttcatgtgtcacacaagtaggccttctggaaagcgtgtatgaaatgttcaggaaggatgacccccgcctaagtttcacacgccagtcctttgtggaccgctccctcctcactctgctgtggcactgtagcctggatgctttgagagaattcttcagcacaattgtggtggatgccattgatgtgttgaagtccaggtttacaaagctaaatgaatctacctttgatactcaaatcaccaagaagatgggctactataagattctagacgtgatgtattctcgccttcccaaagatgatgttcatgctaaggaatcaaaaattaatcaagttttccatggctcgtgtattacagaaggaaatgaacttacaaagacattgattaaattgtgctacgatgcatttacagagaacatggcaggagagaatcagctgctggagaggagaagactttaccattgtgcagcatacaactgcgccatatctgtcatctgctgtgtcttcaatgagttaaaattttaccaaggttttctgtttagtgaaaaaccagaaaagaacttgcttatttttgaaaatctgatcgacctgaagcgccgctataattttcctgtagaagttgaggttcctatggaaagaaagaaaaagtacattgaaattaggaaagaagccagagaagcagcaaatggggattcagatggtccttcctatatgtcttccctgtcatatttggcagacagtaccctgagtgaggaaatgagtcaatttgatttctcaaccggagttcagagctattcatacagctcccaagaccctagacctgccactggtcgttttcggagacgggagcagcgggaccccacggtgcatgatgatgtgctggagctggagatggacgagctcaatcggcatgagtgcatggcgcccctgacggccctggtcaagcacatgcacagaagcctgggcccgcctcaaggagaagaggattcagtgccaagagatcttccttcttggatgaaattcctccatggcaaactgggaaatccaatagtaccattaaatatccgtctcttcttagccaagcttgttattaatacagaagaggtctttcgcccttacgcgaagcactggcttagccccttgctgcagctggctgcttctgaaaacaatggaggagaaggaattcactacatggtggttgagatagtggccactattctttcatggacaggcttggccactccaacaggggtccctaaagatgaagtgttagcaaatcgattgcttaatttcctaatgaaacatgtctttcatccaaaaagagctgtgtttagacacaaccttgaaattataaagacccttgtcgagtgctggaaggattgtttatccatcccttataggttaatatttgaaaagttttccggtaaagatcctaattctaaagacaactcagtagggattcaattgctaggcatcgtgatggccaatgacctgcctccctatgacccacagtgtggcatccagagtagcgaatacttccaggctttggtgaataatatgtcctttgtaagatataaagaagtgtatgccgctgcagcagaagttctaggacttatacttcgatatgttatggagagaaaaaacatactggaggagtctctgtgtgaactggttgcgaaacaattgaagcaacatcagaatactatggaggacaagtttattgtgtgcttgaacaaagtgaccaagagcttccctcctcttgcagacaggttcatgaatgctgtgttctttctgctgccaaaatttcatggagtgttgaaaacactctgtctggaggtggtactttgtcgtgtggagggaatgacagagctgtacttccagttaaagagcaaggacttcgttcaagtcatgagacatagagatgatgaaagacaaaaagtatgtttggacataatttataagatgatgccaaagttaaaaccagtagaactccgagaacttctgaaccccgttgtggaattcgtttcccatccttctacaacatgtagggaacaaatgtataatattctcatgtggattcatgataattacagagatccagaaagtgagacagataatgactcccaggaaatatttaagttggcaaaagatgtgctgattcaaggattgatcgatgagaaccctggacttcaattaattattcgaaatttctggagccatgaaactaggttaccttcaaataccttggaccggttgctggcactaaattccttatattctcctaagatagaagtgcactttttaagtttagcaacaaattttctgctcgaaatgaccagcatgagcccagattatccaaaccccatgttcgagcatcctctgtcagaatgcgaatttcaggaatataccattgattctgattggcgtttccgaagtactgttctcactccgatgtttgtggagacccaggcctcccagggcactctccagacccgtacccaggaagggtccctctcagctcgctggccagtggcagggcagataagggccacccagcagcagcatgacttcacactgacacagactgcagatggaagaagctcatttgattggctgaccgggagcagcactgacccgctggtcgaccacaccagtccctcatctgactccttgctgtttgcccacaagaggagtgaaaggttacagagagcacccttgaagtcagtggggcctgattttgggaaaaaaaggctgggccttccaggggacgaggtggataacaaagtgaaaggtgcggccggccggacggacctactacgactgcgcagacggtttatgagggaccaggagaagctcagtttgatgtatgccagaaaaggcgttgctgagcaaaaacgagagaaggaaatcaagagtgagttaaaaatgaagcaggatgcccaggtcgttctgtacagaagctaccggcacggagaccttcctgacattcagatcaagcacagcagcctcatcaccccgttacaggccgtggcccagagggacccaataattgcaaaacagctctttagcagcttgttttctggaattttgaaagagatggataaatttaagacactgtctgaaaaaaacaacatcactcaaaagttgcttcaagacttcaatcgttttcttaataccaccttctctttctttccaccctttgtctcttgtattcaggacattagctgtcagcacgcagccctgctgagcctcgacccagcggctgttagcgctggttgcctggccagcctacagcagcccgtgggcatccgcctgctagaggaggctctgctccgcctgctgcctgctgagctgcctgccaagcgagtccgtgggaaggcccgcctccctcctgatgtcctcagatgggtggagcttgctaagctgtatagatcaattggagaatacgacgtcctccgtgggatttttaccagtgagataggaacaaagcaaatcactcagagtgcattattagcagaagccagaagtgattattctgaagctgctaagcagtatgatgaggctctcaataaacaagactgggtagatggtgagcccacagaagccgagaaggatttttgggaacttgcatcccttgactgttacaaccaccttgctgagtggaaatcacttgaatactgttctacagccagtatagacagtgagaaccccccagacctaaataaaatctggagtgaaccattttatcaggaaacatatctaccttacatgatccgcagcaagctgaagctgctgctccagggagaggctgaccagtccctgctgacatttattgacaaagctatgcacggggagctccagaaggcgattctagagcttcattacagtcaagagctgagtctgctttacctcctgcaagatgatgttgacagagccaaatattacattcaaaatggcattcagagttttatgcagaattattctagtattgatgtcctcttacaccaaagtagactcaccaaattgcagtctgtacaggctttaacagaaattcaggagttcatcagctttataagcaaacaaggcaatttatcatctcaagttccccttaagagacttctgaacacctggacaaacagatatccagatgctaaaatggacccaatgaacatctgggatgacatcatcacaaatcgatgtttctttctcagcaaaatagaggagaagcttacccctcttccagaagataatagtatgaatgtggatcaagatggagaccccagtgacaggatggaagtgcaagagcaggaagaagatatcagctccctgatcaggagttgcaagttttccatgaaaatgaagatgatagacagtgcccggaagcagaacaatttctcacttgctatgaaactactgaaggagctgcataaagagtcaaaaaccagagacgattggctggtgagctgggtgcagagctactgccgcctgagccactgccggagccggtcccagggctgctctgagcaggtgctcactgtgctgaaaacagtctctttgttggatgagaacaacgtgtcaagctacttaagcaaaaatattctggctttccgtgaccagaacattctcttgggtacaacttacaggatcatagcgaatgctctcagcagtgagccagcctgccttgctgaaatcgaggaggacaaggctagaagaatcttagagctttctggatccagttcagaggattcagagaaggtgatcgcgggtctgtaccagagagcattccagcacctctctgaggctgtgcaggcggctgaggaggaggcccagcctccctcctggagctgtgggcctgcagctggggtgattgatgcttacatgacgctggcagatttctgtgaccaacagctgcgcaaggaggaagagaatgcatcagttattgattctgcagaactgcaggcgtatccagcacttgtggtggagaaaatgttgaaagctttaaaattaaattccaatgaagccagattgaagtttcctagattacttcagattatagaacggtatccagaggagactttgagcctcatgacaaaagagatctcttccgttccctgctggcagttcatcagctggatcagccacatggtggccttactggacaaagaccaagccgttgctgttcagcactctgtggaagaaatcactgataactacccgcaggctattgtttatcccttcatcataagcagcgaaagctattccttcaaggatacttctactggtcataagaataaggagtttgtggcaaggattaaaagtaagttggatcaaggaggagtgattcaagattttattaatgccttagatcagctctctaatcctgaactgctctttaaggattggagcaatgatgtaagagctgaactagcaaaaacccctgtaaataaaaaaaacattgaaaaaatgtatgaaagaatgtatgcagccttgggtgacccaaaggctccaggcctgggggcctttagaaggaagtttattcagacttttggaaaagaatttgataaacattttgggaaaggaggttctaaactactgagaatgaagctcagtgacttcaacgacattaccaacatgctacttttaaaaatgaacaaagactcaaagccccctgggaatctgaaagaatgttcaccctggatgagcgacttcaaagtggagttcctgagaaatgagctggagattcccggtcagtatgacggtaggggaaagccattgccagagtaccacgtgcgaatcgccgggtttgatgagcgggtgacagtcatggcgtctctgcgaaggcccaagcgcatcatcatccgtggccatgacgagagggaacaccctttcctggtgaagggtggcgaggacctgcggcaggaccagcgcgtggagcagctcttccaggtcatgaatgggatcctggcccaagactccgcctgcagccagagggccctgcagctgaggacctatagcgttgtgcccatgacctccaggttaggattaattgagtggcttgaaaatactgttaccttgaaggaccttcttttgaacaccatgtcccaagaggagaaggcggcttacctgagtgatcccagggcaccgccgtgtgaatataaagattggctgacaaaaatgtcaggaaaacatgatgttggagcttacatgctaatgtataagggcgctaatcgtactgaaacagtcacgtcttttagaaaacgagaaagtaaagtgcctgctgatctcttaaagcgggccttcgtgaggatgagtacaagccctgaggctttcctggcgctccgctcccacttcgccagctctcacgctctgatatgcatcagccactggatcctcgggattggagacagacatctgaacaactttatggtggccatggagactggcggcgtgatcgggatcgactttgggcatgcgtttggatccgctacacagtttctgccagtccctgagttgatgccttttcggctaactcgccagtttatcaatctgatgttaccaatgaaagaaacgggccttatgtacagcatcatggtacacgcactccgggccttccgctcagaccctggcctgctcaccaacaccatggatgtgtttgtcaaggagccctcctttgattggaaaaattttgaacagaaaatgctgaaaaaaggagggtcatggattcaagaaataaatgttgctgaaaaaaattggtacccccgacagaaaatatgttacgctaagagaaagttagcaggtgccaatccagcagtcattacttgtgatgagctactcctgggtcatgagaaggcccctgccttcagagactatgtggctgtggcacgaggaagcaaagatcacaacattcgtgcccaagaaccagagagtgggctttcagaagagactcaagtgaagtgcctgatggaccaggcaacagaccccaacatccttggcagaacctgggaaggatgggagccctggatgtgaggtctgtgggagtctgcagatagaaagcattacattgtttaaagaatctactatactttggttggcagcattccatgagctgattttcctgaaacactaaagagaaatgtcttttgtgctacagtttcgtagcatgagtttaaatcaagattatgatgagtaaatgtgtatgggttaaatcaaagataaggttatagtaacatcaaagattaggtgaggtttatagaaagatagatatccaggcttaccaaagtattaagtcaagaatataatatgtgatcagctttcaaagcatttacaagtgctgcaagttagtgaaacagctgtctccgtaaatggaggaaatgtggggaagccttggaatgcccttctggttctggcacattggaaagcacactcagaaggcttcatcaccaagattttgggagagtaaagctaagtatagttgatgtaacattgtagaagcagcataggaacaataagaacaataggtaaagctataattatggcttatatttagaaatgactgcatttgatattttaggatatttttctaggttttttcctttcattttattctcttctagttttgacattttatgatagatttgctctctagaaggaaacgtctttatttaggagggcaaaaattttggtcatagcattcacttttgctattccaatctacaactggaagatacataaaagtgctttgcattgaatttgggataacttcaaaaatcccatggttgttgttagggatagtactaagcatttcagttccaggagaataaaagaaattcctatttgaaatgaattcctcatttggaggaaaaaaagcatgcattctagcacaacaagatgaaattatggaatacaaaagtggctccttcccatgtgcagtccctgtccccccccgccagtcctccacacccaaactgtttctgattggcttttagctttttgttgtttttttttttccttctaacacttgtatttggaggctcttctgtgattttgagaagtatactcttgagtgtttaataaagtttttttccaaaagta

SEQ ID NO: 985 - DNA, 3958 bp, Homo sapiens
ggcagtgcgagcagccgaggccaccaagaggcaacgggcggcaggttgcagtggaggggcctccgctcccctcggtggtgtgtgggtcctgggggtgcctgccggcccagcgaggaggcccacgcccaccatggtcccctgctggaaccatggcaacatcacccgctccaaggcggaggagctgctttccaggacaggcaaggacgggagcttcctcgtgcgtgccagcgagtccatctcccgggcatacgcgctctgcgtgctgtatcggaattgcgtttacacttacagaattctgcccaatgaagatgataaattcactgttcaggcatccgaaggcgtctccatgaggttcttcaccaagctggaccagctcatcgagttttacaagaaggaaaacatggggctggtgacccatctgcaataccctgtgccgctggaggaagaggacacaggcgacgaccctgaggaggacacagtagaaagtgtcgtgtctccacccgagctgcccccaagaaacatcccgctgactgccagctcctgtgaggccaaggaggttcctttttcaaacgagaatccccgagcgaccgagaccagccggccgagcctctccgagacattgttccagcgactgcaaagcatggacaccagtgggcttccagaagagcatcttaaggccatccaagattatttaagcactcagctcgcccaggactctgaatttgtgaagacagggtccagcagtcttcctcacctgaagaaactgaccacactgctctgcaaggagctctatggagaagtcatccggaccctcccatccctggagtctctgcagaggttatttgaccagcagctctccccgggcctccgtccacgtcctcaggttcctggtgaggccaatcccatcaacatggtgtccaagctcagccaactgacaagcctgttgtcgtccattgaagacaaggtcaaggccttgctgcacgagggtcctgagtctccgcaccggccctcccttatccctccagtcacctttgaggtgaaggcagagtctctggggattcctcagaaaatgcagctcaaagtcgacgttgagtctgggaaactgatcattaagaagtccaaggatggttctgaggacaagttctacagccacaagaaaatcctgcagctgattaagtcacagaaatttctgaataagttggtgatcttggtggaaacagagaaggagaagatcctgcggaaggaatatgtttttgctgactccaaaaagagagaaggcttctgccagctcctgcagcagatgaagaacaagcactcagagcagccggagcccgacatgatcaccatcttcatcggcacctggaacatgggtaacgccccccctcccaagaagatcacgtcctggtttctctccaaggggcagggaaagacgcgggacgactctgcggactacatcccccatgacatttacgtgatcggcacccaagaggaccccctgagtgagaaggagtggctggagatcctcaaacactccctgcaagaaatcaccagtgtgacttttaaaacagtcgccatccacacgctctggaacatccgcatcgtggtgctggccaagcctgagcacgagaaccggatcagccacatctgtactgacaacgtgaagacaggcattgcaaacacactggggaacaagggagccgtgggggtgtcgttcatgttcaatggaacctccttagggttcgtcaacagccacttgacttcaggaagtgaaaagaaactcaggcgaaaccaaaactatatgaacattctccggttcctggccctgggcgacaagaagctgagtccctttaacatcactcaccgcttcacgcacctcttctggtttggggatcttaactaccgtgtggatctgcctacctgggaggcagaaaccatcatccagaaaatcaagcagcagcagtacgcagacctcctgtcccacgaccagctgctcacagagaggagggagcagaaggtcttcctacacttcgaggaggaagaaatcacgtttgccccaacctaccgttttgagagactgactcgggacaaatacgcctacaccaagcagaaagcgacagggatgaagtacaacttgccttcctggtgtgaccgagtcctctggaagtcttatcccctggtgcacgtggtgtgtcagtcttatggcagtaccagcgacatcatgacgagtgaccacagccctgtctttgccacatttgaggcaggagtcacttcccagtttgtctccaagaacggtcccgggactgttgacagccaaggacagattgagtttctcaggtgctatgccacattgaagaccaagtcccagaccaaattctacctggagttccactcgagctgcttggagagttttgtcaagagtcaggaaggagaaaatgaagaaggaagtgagggggagctggtggtgaagtttggtgagactcttccaaagctgaagcccattatctctgaccctgagtacctgctagaccagcacatcctcatcagcatcaagtcctctgacagcgacgaatcctatggcgagggctgcattgcccttcggttagaggccacagaaacgcagctgcccatctacacgcctctcacccaccatggggagttgacaggccacttccagggggagatcaagctgcagacctctcagggcaagacgagggagaagctctatgactttgtgaagacggagcgtgatgaatccagtgggccaaagaccctgaagagcctcaccagccacgaccccatgaagcagtgggaagtcactagcagggcccctccgtgcagtggctccagcatcactgaaatcatcaaccccaactacatgggagtggggccctttgggccaccaatgcccctgcacgtgaagcagaccttgtcccctgaccagcagcccacagcctggagctacgaccagccgcccaaggactccccgctggggccctgcaggggagaaagtcctccgacacctcccggccagccgcccatatcacccaagaagtttttaccctcaacagcaaaccggggtctccctcccaggacacaggagtcaaggcccagtgacctggggaagaacgcaggggacacgctgcctcaggaggacctgccgctgacgaagcccgagatgtttgagaaccccctgtatgggtccctgagttccttccctaagcctgctcccaggaaggaccaggaatcccccaaaatgccgcggaaggaacccccgccctgcccggaacccggcatcttgtcgcccagcatcgtgctcaccaaagcccaggaggctgatcgcggcgaggggcccggcaagcaggtgcccgcgccccggctgcgctccttcacgtgctcatcctctgccgagggcagggcggccggcggggacaagagccaagggaagcccaagaccccggtcagctcccaggccccggtgccggccaagaggcccatcaagccttccagatcggaaatcaaccagcagaccccgcccaccccgacgccgcggccgccgctgccagtcaagagcccggcggtgctgcacctccagcactccaagggccgcgactaccgcgacaacaccgagctcccgcatcacggcaagcaccggccggaggaggggccaccagggcctctaggcaggactgccatgcagtgaagccctcagtgagctgccactgagtcgggagcccagaggaacggcgtgaagcactggaccctctcccgggacctcctgctggctcctcctgcccagcttcctatgcaaggctttgtgttttcaggaaagggcctagcttctgtgtggccacagagttcactgcctgtgagacttagcaccaagtgctgaggctggaagaaaaacgcacaccagacgggcaacaacagtctgggtcccagctcgctcttggtacttggg

SEQ ID NO: 986 - DNA, 1082 bp, Homo sapiens
tgtcagcacgatggaccccaaacagaccaccctcctgtgtcttggggactttcccatgcctttcatatctgccaaatcgagtcctgtgattcccttggatggatctgtgaaaatccagtgccaggccattcgtgaagcttacctgacccagctgatgatcataaaaaactccacgtaccgagagataggcagaagactgaagttttggaatgagactgatcctgagttcgtcattgaccacatggacgcaaacaaggcagggcgctatcagtgccaatataggatagggcactacaggttccggtacagtgacaccctggagctggtagtgacaggcttgtatggcaaacccttcctctctgcagatcggggtctggtgttgatgccaggagagaatatttccctcacgtgcagctcagcacacatcccatttgatagattttcactggccaaggagggagaactttctctgccacagcaccaaagtggggaacacccggccaacttctctttgggtcctgtggacctcaatgtctcagggatctacaggtgctacggttggtacaacaggagcccctacctgtggtccttccccagtaatgccttggagcttgtggtcacaggtaggtaccgcccagtccagccctgtgtctgggttggctgtccagggccttgccaccgggcaggaatatgaagacgtgcactgagagtgaagtgaagagaggcaaaggctctcactccaggacagtggagagagaaaggcttccccaccacactttccgctttcacttcctcgctagagtctccagacagggttcattgaaaacttagtctgtggagaaccagaagggctaactcagtttgtttcattttatttatttcattttattttccgggatagagtcttgctctttcgccaaggctggagtgcagtggcacgatctcgactcactgcaaccttcgcctcccaggagaatcacttgaacccaggaggcagctgttgcagtgagccaagatcacgccattgcactccagcctgggttgacagaacgagactccacctcaaaaaaaaaaaaaaaaaa

SEQ ID NO: 987 - DNA, 1042 bp, Homo sapiens
tttcctcactgactataaaagaatagagaaggaagggcttcagtgaccggctgcctggctgacttacagcagtcagactctgacaggatcatggctatgatggaggtccaggggggacccagcctgggacagacctgcgtgctgatcgtgatcttcacagtgctcctgcagtctctctgtgtggctgtaacttacgtgtactttaccaacgagctgaagcagatgcaggacaagtactccaaaagtggcattgcttgtttcttaaaagaagatgacagttattgggaccccaatgacgaagagagtatgaacagcccctgctggcaagtcaagtggcaactccgtcagctcgttagaaagatgattttgagaacctctgaggaaaccatttctacagttcaagaaaagcaacaaaatatttctcccctagtgagagaaagaggtcctcagagagtagcagctcacataactgggaccagaggaagaagcaacacattgtcttctccaaactccaagaatgaaaaggctctgggccgcaaaataaactcctgggaatcatcaaggagtgggcattcattcctgagcaacttgcacttgaggaatggtgaactggtcatccatgaaaaagggttttactacatctattcccaaacatactttcgatttcaggaggaaataaaagaaaacacaaagaacgacaaacaaatggtccaatatatttacaaatacacaagttatcctgaccctatattgttgatgaaaagtgctagaaatagttgttggtctaaagatgcagaatatggactctattccatctatcaagggggaatatttgagcttaaggaaaatgacagaatttttgtttctgtaacaaatgagcacttgatagacatggaccatgaagccagttttttcggggcctttttagttggctaactgacctggaaagaaaaagcaataacctcaaagtgactattcagttttcaggatgatacactatgaagatgtttcaaaaaatctgaccaaaacaaacaaacagaaa

SEQ ID NO: 988 - DNA, 1809 bp, Homo sapiens
atgtggctcttcttcgggatcactggattgctgacggcagccctctcaggtcatccatctccagccccacctgaccagctcaacaccagcagtgcagagagtgagctctgggagccaggggagcggcttccggtccgtctgacaaacgggagcagcagctgcagcgggacggtggaggtgcggctcgaggcgtcctgggagcccgcgtgcggggcgctctgggacagccgcgccgccgaggccgtgtgccgagcactgggctgcggcggggcggaggccgcctctcagctcgccccgccgacccctgagctgccgcccccgcctgcagccgggaacaccagcgtagcagctaatgccactctggccggggcgcccgccctcctgtgcagcggcgccgagtggcggctctgcgaggtggtggagcacgcgtgccgcagcgacgggaggcgggcccgtgtcacctgtgcagagaaccgcgcgctgcgcctggtggacggtggcggcgcctgcgccggccgcgtggagatgctggagcatggcgagtggggatcagtgtgcgatgacacttgggacctggaggacgcccacgtggtgtgcaggcaactgggctgcggctgggcagtccaggccctgcccggcttgcacttcacgcccggccgcgggcctatccaccgggaccaggtgaactgctcgggggccgaagcttacctgtgggactgcccggggctgccaggacagcactactgcggccacaaagaggacgcgggcgtggtgtgctcagagcaccagtcctggcgcctgacagggggcgctgaccgctgcgaggggcaggtggaggtacacttccgaggggtctggaacacagtgtgtgacagtgagtggtacccatcggaggccaaggtgctctgccagtccttgggctgtggaactgcggttgagaggcccaaggggctgccccactccttgtccggcaggatgtactactcatgcaatggggaggagctcaccctctccaactgctcctggcggttcaacaactccaacctctgcagccagtcgctggcagccagggtcctctgctcagcttcccggagtttgcacaatctgtccactcccgaagtccctgcaagtgttcagacagtcactatagaatcttctgtgacagtgaaaatagagaacaaggaatctcgggagctaatgctcctcatcccctccatcgttctgggaattctcctccttggctccctcatcttcatagccttcatcctcttgagaattaaaggaaaatatgttttcatgctgcccatccaggtccaggccccgccccctgaggactcagactctggctcggactcagactatgagcactatgacttcagcgcccagcctcctgtggccctgaccaccttctacaattcccagcggcatcgggtcacagatgaggaggtccagcaaagcaggttccagatgccacccttggaggaaggacttgaagagttgcatgcctcccacatcccaactgccaaccctggacactgcattacagacccgccatccctgggccctcagtatcacccgaggagcaacagtgagtcgagcacctcttcaggggaggattactgcaatagtcccaaaagcaagctgcctccatggaacccccaggtgttttcttcagagaggagttccttcctggagcagcccccaaacttggagctggccggcacccagccagccttttcagggtcccccagccctcagcctgactccaccgacaacgatgactacgatgacatcagcgcagcctaggcc

SEQ ID NO: 989 - DNA, 2384 bp, Homo sapiens
cctgctcgttcctgacagaattaacggcacagccaacaagatgaacggagctttggatcactcagaccaaccagacccagatgccattaagatgtttgtcggacagatcccccggtcatggtcggaaaaggagctgaaagaactttttgagccttacggagccgtctaccagatcaacgtcctccgggaccggagtcagaaccctccgcagagtaaaggttgttgtttcgtaacattttatacaagaaaagctgcacttgaggcccagaatgcactgcacaatattaaaactttacctgggatgcatcatcccattcagatgaaacctgcagatagtgaaaagtccaacgctgtggaagacagaaaattgttcataggaatggtttcgaagaaatgtaatgagaacgacatcagggtgatgttctctccatttggccagatagaagaatgccggatcctccggggacctgatgggctgagtcgaggctgtgcgtttgtcacattttctacaagggcaatggcacagaatgcaatcaaagccatgcatcagtctcagaccatggagggctgctcttcacctatcgtggtgaagtttgctgacactcagaaggacaaagagcaaaggcgcctccagcagcagctcgctcagcagatgcagcagctcaacactgccacctgggggaacctgacagggctgggcggactgaccccacagtatctggcgctcctgcagcaggccacctcctccagcaacctgggtgcgttcagcggcattcaacaaatggcaggcatgaatgctttacagttgcagaacctggcgacgctggctgctgctgcagctgcggcccagacctcagccaccagcaccaatgcaaaccctctctctaccacgagcagcgccctgggagccctcacgagtcccgtggctgcttcaacccccaactccactgctggtgcagccatgaactccttgacctctctcgggactctgcaaggactggctggagccactgttggactgaataatattaatgcactagcagttgctcaaatgctctcaggtatggcggctctgaatggaggacttggcgccacaggcttgacgaatggcacggctggcaccatggacgccctcacccaggcctactcaggaattcaacagtacgcagccgccgcgctgcccactctgtacagccagagcctgctgcagcagcagagcgctgcaggcagccagaaggaaggtccagagggggcaaacctctttatttaccaccttccacaggaatttggagaccagcacattctgcagatgttcatgccttttggaaatgttatctctgctaaagtcttcattgacaaacagaccaatctgagcaagtgctttggttttgttagctacgacaatccagtctctgcacaagctgctatccaagctatgaatggctttcagatcggcatgaaacgcttgaaggtgcagctgaagcgttccaaaaacgacagcaaaccttactgatcctaaccccagaggctccctgctctcattttagctttcttaggacatcttcatgcccgttagttcatcgtttgcctagcatgtccctgtggcgtctcaaaaaaaagtttcatcgtcccgtcattgtttctgatgtctttctgacctcacatcatatttggttctcctactgacctttgatctagtttgacctttgaaatttgcatgtgacctcatctagctatgaattctgggaagtcaatgtgaaaaacattgctgcattcatgcaagactgaaatttattattagacaaattcattatagaaaaaacctgtggcaaaaacgtttctttcttattttttttcttttcctaaaacagacttgaaagtattatacagggattggcattcttcccggtcactggtaacaatagcaatatgtgtccagggacacagaatgttggtttctaacagactacttccaaaaacagtttgagaaaaaaactgtctgattttaagtctctagaggtctgtaatagtttttacatttttcaggcagtgtaaagttttttgataaggccattttaggtggctcactttctcattaagatatatatatagaaccactttttgtagattagtataagaaaaatatttaccctgttttggggcaaatgctacctatttgtgtcaccttttgctgaactcacagttagacaatccatggtttaatgcacatgaaattacctatattttatactgtttcaatgtacaggagaaaggttactgtaaactgtgttatgttggtgcttctgtgaattaagttgtggtttcatcatgagtcttaatgttctttgttgataagacaagtttagaattggtttacttaatac

SEQ ID NO: 990 - DNA, 3084 bp, Homo sapiens
tccggaaacagtgggggtaggaaaactcggcctcaagttgcgccctctaggtagcacttgaaaacatgacaagggcccgtagttgtttggataagagaactccagcatagagccttatagcaactgacttcccagttaagtcccagtgtaagggttggtctttggttggcagaactgaacatggtggtttgcacttgggttctggtggcgcaggcgcaggagcagccagctgtggcagcgcattagttttggcgcaagcgagcctatgctgcagggtcacttttggctggtcagagaaggaataatgatatcaccttcttccccccctccccccaatcttttttttttccctttacaaattttcccctttccctttacctcctttccctcccatcttctttcattaacccctcctaaggcatgttatttgaaagcaattgagacgcaaccgaactttgcagtagcttggagtaatcttggctgtgttttcaatgcacaaggggaaatttggcttgcaattcatcactttgaaaaggctgtcacccttgacccaaactttctggatgcttatatcaatttaggaaatgtcttgaaagaggcacgcatttttgacagagctgtggcagcttatcttcgtgccctaagtttgagtccaaatcacgcagtggtgcacggcaacctggcttgtgtatactatgagcaaggcctgatagatctggcaatagacacctacaggcgggctatcgaactacaaccacatttccctgatgcttactgcaacctagccaatgctctcaaagagaagggcagtgttgctgaagcagaagattgttataatacagctctccgtctgtgtcccacccatgcagactctctgaataacctagccaatatcaaacgagaacagggaaacattgaagaggcagttcgcttgtatcgtaaagcattagaagtcttcccagagtttgctgctgcccattcaaatttagcaagtgtactgcagcagcagggaaaactgcaggaagctctgatgcattataaggaggctattcgaatcagtcctacctttgctgatgcctactctaatatgggaaacactctaaaggagatgcaggatgttcagggagccttgcagtgttatacgcgtgccatccaaattaatcctgcatttgcagatgcacatagcaatctggcttccattcataaggattcagggaatattccagaagccatagcttcttaccgcacggctctgaaacttaagcctgattttcctgatgcttattgtaacttggctcattgcctgcagattgtctgtgattggacagactatgatgagcgaatgaagaagttggtcagtattgtggctgaccagttagagaagaataggttgccttctgtgcatcctcatcatagtatgctatatcctctttctcatggcttcaggaaggctattgctgagaggcacggcaacctgtgcttagataagattaatgttcttcataaaccaccatatgaacatccaaaagacttgaagctcagtgatggtcggctgcgtgtaggatatgtgagttccgactttgggaatcatcctacttctcaccttatgcagtctattccaggcatgcacaatcctgataaatttgaggtgttctgttatgccctgagcccagacgatggcacaaacttccgagtgaaggtgatggcagaagccaatcatttcattgatctttctcagattccatgcaatggaaaagcagctgatcgcatccatcaggatggaattcatatccttgtaaatatgaatggctatactaagggcgctcgaaatgagctttttgctctcaggccagctcctattcaggcaatgtggctgggataccctgggacgagtggtgcgcttttcatggattatattatcactgatcaggaaacttcgccagctgaagttgctgagcagtattccgagaaattggcttatatgccccacactttttttattggtgatcatgctaatatgttccctcacctgaagaaaaaagcagtcatcgattttaagtccaatgggcacatttatgacaatcggatagttctgaatggcatcgacctcaaagcatttcttgatagtctaccagatgtgaaaattgtcaagatgaagtgtcctgatggaggagacaatgcagatagcagtaacacagctcttaatatgcctgttattcctatgaatactattgcagaagcagttattgaaatgattaaccgaggacagattcaaataacaattaatggattcagtattagcaatggactggcaactactcagatcaacaataaggctgcaactggagaggaggttccccgtaccattattgtaaccacccgttctcagtacgggttaccagaagatgccatcgtatactgtaactttaatcagttgtataaaattgacccttctactttgcagatgtgggcaaacattctgaagcgtgttcccaatagtgtactctggctgttgcgttttccagcagtaggagaacctaatattcaacagtatgcacaaaacatgggcctgccccagaaccgtatcattttttcacctgttgctcctaaagaggaacacgtcaggagaggccagctggctgatgtctgcttggacactccactctgtaatgggcacaccacagggatggatgtcctctgggcagggacccccatggtgactatgccaggagagactcttgcttctcgagttgcagcatcccagctcacttgcttaggttgtcttgagcttattgctaaaaacagacaagaatatgaagacatagctgtgaagctgggaactgatctagaatacctgaagaaagttcgtggcaaagtctggaagcaaagaatatctagccctctgttcaacaccaaacaatacacaatggaactagagcggctctatctacagatgtgggagcattatgcagctggcaacaaacctgaccacatgattaagcctgttgaagtcactgagtcagcataaataaagactgcacaggagaattacccctaaaaaaaaaaaaaaaaaagggcggccgc

SEQ ID NO: 991 - DNA, 3487 bp, Homo sapiens
  misc_feature (2733)..(2733): n is a, c, g, or t
  misc_feature (2804)..(2804): n is a, c, g, or t
  misc_feature (2876)..(2876): n is a, c, g, or t
gaattcctttttttgactgagtctccctctgtcacctaggctggagtgcagtggcacaatcttggctcgctgcaaccttcacccttcacctcccaggtcgaagcgattctcctgcctcagtctcccgagtagctgggattacaggcgtgcgccaccaaatctggctatttttttattattattattttgagtagagatggggtttcaccatgttggccagactggtcttgaactcttggcctcaaattatctgcccacctcggcctcccaaagtgctgggattacaggcatgagccaccatgcccagatgacaagactaattttttatccctttggtttattggctacaacatcttcttggaatcagaggtgaattttttcttaccttgggatgcctgagactaggggagtatagaattccaattggtaattaaggcatctttctgctcctgatcagaagggcaggttagttgggagaggtcagatggcacaacagaagtcaccttgtaagtaaggcaaagacttgaaggcattagcgtttctcattactaggtcaataacctgagggaatcaatggctttttgccgctctacctcttgtgtatctctttgacttttctttctctgtctagggcattcctgaacttgtcaatcagggacaggcattagagcccaaacaggatgctttccaaggccaagaagcagcagtaatgatggatcagaaggcaggattatatggacagacatacccagcacaggggcctccaatgcaaggaggctttcatcttcagggacaatcaccatcttttaactctatgatgaatcagatgaaccagcaaggcaattttcctctccaaggaatgcacccacgagccaacatcatgagaccccggacaaacacccccaagcaacttagaatgcagcttcagcagaggctgcagggccagcagtttttgaatcagagccgacaggcacttgaattgaaaatggaaaaccctactgctggtggtgctgcggtgatgaggcctatgatgcagccccaggtgagctcccaggagggttttcttaatgctcaaatgggcgcccaacggaggagagagctgctaagtcatcacttccgacaacagagggtggctatgatgatgcagcagcagcaacagcagcaacagcagcagcagcagcagcagcagcagcagcagcagcaacagcaacagcaacagcagcaacaggagcaaccccaggtcttcagcccacctcctaatgtgactgctcccccagcatggatggcttkyggcaggacccacaatgccacaagctcctccgcaacaagtttccaatatccaaccccaaattatgggaatggggaccaaccaacaaagatccagcctttgggtcgagtgtctaagtcctcccaatgcaatgatgtcgtcaagaatggtccctcccagaatcccatgatgcaacacccgcaggctgcatccatctatcagtcctcagaaatgaagggctggccatcaggaaatttggccaggaacagctccttttcccagcagcagtttgcccaccaggggaatcctgcagtgtatagtatggtgcacatgaatggcagcagtggtcacatgggacagatgaacatgaaccccatgcccatgtctggcatgcctatgggtcctgatcagaaatactgctgacatctctgcaccaggacctcttaaggaaaccactgtacaaatgacactgcactaggattattgggaaggaatcattgttcccaggccatccatcttgggaagaaaggaccagcttttgagctccatcaagggtattttaagtgatgtcatttgagcaggactggattttaagccgaagggcaatatccaacgtgtttttcccccctccttcctgctgtgtatcatggtgttcaaaacagaaatgttttttggcattccacctcctagggatataattctggagacatggagtgttactgatcataaaacttttgtgtcacttttttctgccttgctagccaaaatctcttaaatacacgtaggtgggccagagaacattggaagaatcaagagagattagaatatctggtttctctagttgcagtattggacaaagagcatagtcccagccttcaggtgtagtagttctgtgttgaccctttgtccagtggaattggtgattctgaattgtcctttactaatgttgttgagttgctctgtccctattatttgccctagcctttctcctaatggggttttcatttgccattcatgtccctgtaaaacttcacctccaggaactgtcatggatgtccaaatggctttgcagaaaggaaatgagatgacagtatttaatcgcagcagtagcaaacttttcacatgctaatgtgcagctgagtgcactttatttaaaaagaatggataaatgcaatattcttgaggtcttgagggaatagtgaaacacattcctggtttttgcctacacttacgtgttagacaagaactatgatttttttttttaaagtactggtgtcaccctttgcctatatggtagagcaataatgctttttaaaaataaacttctgaaaacccaaggccaggtactgcattctgaatcagaatctcgcagtgtttctgtgaatagatttttttgtaaatatgacctttaagatattgtattatgtaaaatatgtatataccttttttttgtaggtgcacagcgnctcatttttacagagtttgtgaagctaaatatttaacattgttgatttcagtaagctgtgtggtgaggctnccagtggaagagacatcccttgacttttgtggcctgggggaggggtagtgctccacagcttttccttccccnccccccagccttagatgcctcgctcttttcaatctcttaatctaaatgctttttaaagagattatttgtttagatgtaggcattttaattttttaaaaattcctctaccagaactaagcactttgttaatttggggggggagaatagatatggggagaaaaaacttaaaaaaaaaatcaggaattaaaaaaagcgagcaatttgaagagaatcttttggattttaagcagtccgaaataatagcaattcatgggctgtgtgtgtgtgtgtatgtgtgtgtgtgtgtgtgtgaatgtttaagtatgttaccttttcatcccctttaggagcgttttcagattttggttgctaagacctgaatcccatattgagatctcgagtagaatccttggtgtggtttctggtgtctgctcagctgtcccctcattctactaatgtgatgctttcattatgtccctgtggattagaatagtgtcagttatttcttaagtaactcagtacccagaacaaccagttttactgtgattcagagccacagtctaactgagcaccttttaaacccctccctcttctgccccctaccacttttctgctgttgcctctcggaattc

SEQ ID NO: 992 - DNA, 1452 bp, Homo sapiens
tcatccatccgcagagcagggcagtgggaggagacgccatgacccccatcctcacggtcctgatctgtctcgggcacctccccaagcccaccctctgggctgagccaggctctgtgatcatccagggaagtcctgtgaccctcaggtgtcaggggagccttcaggctgaggagtaccatctatatagggaaaacaaatcagcatcctgggttagacggatacaagagcctgggaagaatggccagttccccatcccatccatcacctgggaacacgcagggcggtatcactgtcagtactacagccacaatcactcatcagagtacagtgaccccctggagctggtggtgacaggagcctacagcaaacccaccctctcagctctgcccagccctgtggtgaccttaggagggaacgtgaccctccagtgtgtctcacaggtggcatttgacggcttcattctgtgtaaggaaggagaagatgaacacccacaacgcctgaactcccattcccatgcccgtgggtggtcctgggccatcttctccgtgggccccgtgagcccgagtcgcaggtggtcgtacaggtgctatgcttatgactcgaactctccctatgtgtggtctctacccagtgatctcctggagctcctggtcccaggtgtttctaagaagccatcactctcagtgcagccaggtcctatggtggcccctggggagagcctgaccctccagtgtgtctctgatgtcggctacgacagatttgttctgtataaggagggagaacgtgacttcctccagcgccctggttggcagccccaggctgggctctcccaggccaacttcaccctgggccctgtgagcccctcccacgggggccagtacagatgctacagtgcacacaacctctcctccgagtggtcggcccccagtgaccccctggacatcctgatcacaggacagttctatgacagaccctctctctcggtgcagccggtccccacagtagccccaggaaagaacgtgaccctgctgtgtcagtcacgggggcagttccacactttccttctgaccaaggagggggcaggccatcccccactgcatctgagatcagagcaccaagctcagcagaaccaggctgaattccgcatgggtcctgtgacctcagcccacgtggggacctacagatgctacagctcactcagctccaacccctacctgctgtctctccccagtgaccccctggagctcgtggtctcagcatccctaggccaacacccccaggattacacagtggagaatctcatccgcatgggtgtggctggcttggtcctggtggtcctcgggattctgctatttgaggctcagcacagccagagaagcctacaagatgcagccgggaggtgaacagcagagaggacaatgcatacttcagcgtggtggagcctcagggaca

SEQ ID NO: 993 - DNA, 661 bp, Homo sapiens
atgacccccatcctcacggtcctgatctgtctcgggctgagtctgggccccaggacccacgtgcaggcagggcacctccccaagcccaccctctgggctgagccaggctctgtgatcatccagggaagtcctgtgaccctcaggtgtcaggggagccttcaggctgaggagtaccatctatatagggaaaacaaatcagcatcctgggttagacggatacaagagcctgggaagaatggccagttccccatcccatccatcacctgggaacacgcagggcggtatcactgtcagtactacagccacaatcactcatcagagcaccaagctcagcagaaccaggctgaattccgcatgggtcctgtgacctcagcccacgtggggacctacagatgctacagctcactcagctccaacccctacctgctgtctctccccagtgaccccctggagctcgtggtctcagcatccctaggccaacacccccaggattacacagtggagaatctcatccgcatgggtgtggctggcttggtcctggtggtcctcgggattctgctatttgaggctcagcacagccagagaagcctacaagatgcagccgggaggtgaacagcagagaggacaatgcatacttcagcgtggtggagcctcagggaca

SEQ ID NO: 994 - DNA, 1501 bp, Homo sapiens
atgacccccatcctcacggtcctgatctgtctcgggctgagtctgggccccaggacccacgtgcaggcagggcacctccccaagcccaccctctgggctgagccaggctctgtgatcatccagggaagtcctgtgaccctcaggtgtcaggggagccttcaggctgaggagtaccatctatatagggaaaacaaatcagcatcctgggttagacggatacaagagcctgggaagaatggccagttccccatcccatccatcacctgggaacacgcagggcggtatcactgtcagtactacagccacaatcactcatcagagtacagtgaccccctggagctggtggtgacaggagcctacagcaaacccaccctctcagctctgcccagccctgtggtgaccttaggagggaacgtgaccctccagtgtgtctcacaggtggcatttgacggcttcattctgtgtaaggaaggagaagatgaacacccacaacgcctgaactcccattcccatgcccgtgggtggtcctgggccatcttctccgtgggccccgtgagcccgagtcgcaggtggtcgtacaggtgctatgcttatgactcgaactctccctatgtgtggtctctacccagtgatctcctggagctcctggtcccaggtgtttctaagaagccatcactctcagtgcagccaggtcctatggtggcccctggggagagcctgaccctccagtgtgtctctgatgtcggctacgacagatttgttctgtataaggagggagaacgtgacttcctccagcgccctggttggcagccccaggctgggctctcccaggccaacttcaccctgggccctgtgagcccctcccacgggggccagtacagatgctacagtgcacacaacctctcctccgagtggtcggcccccagtgaccccctggacatcctgatcacaggacagttctatgacagaccctctctctcggtgcagccggtccccacagtagccccaggaaagaacgtgaccctgctgtgtcagtcacgggggcagttccacactttccttctgaccaaggagggggcaggccatcccccactgcatctgagatcagagcaccaagctcagcagaaccaggctgaattccgcatgggtcctgtgacctcagcccacgtggggacctacagatgctacagctcactcagctccaacccctacctgctgtctctccccagtgaccccctggagctcgtggtctcagaagcagctgagaccctcagcccatcacaaaacaagacagactccacgactacatccctaggccaacacccccaggattacacagtggagaatctcatccgcatgggtgtggctggcttggtcctggtggtcctcgggattctgctatttgaggctcagcacagccagagaagcctacaagatgcagccgggaggtgaacagcagagaggacaatgcatacttcagcgtggtggagcctcagggaca

SEQ ID NO: 995 - DNA, 2331 bp, Homo sapiens
cccagttgttgatcttatgcaagacgctgcacgaccccgcgcccgcttgtcgccacggcacttgaggcagccggagatactctgagttactcggagcccgacgcctgagggtgagatgaacgcgctggcctccctaaccgtccggacctgtgatcgcttctggcagaccgaaccggcgctcctgcccccggggtgacgcgcagctcccagccgcccagacacatggccccaggccaagcaccccatcaggctaccccgtggagggatgcccaccctttcttcctcctgtccccagtgatgggcctcctcagccgcgcctggagccgcctgaggggcctgggacctctagagccctggctggtggaagcagtaaaaggagcagctctggtagaagctggcctggagggagaagctaggactcctctggcaatcccccataccccttggggcagacgccctgaagaggaggctgaagacagtggaggccctggagaggacagagaaacactggggctgaaaaccagcagttcccttcctgaagcctggggacttttggatgatgatgatggcatgtatggtgagcgagaggcaaccagtgtccctagagggcagggaagtcaatttgcagatggccagcgtgctcccctgtctcccagccttctgataaggacactgcaaggttctgataagaacccaggggaggagaaagccgaggaagagggagttgctgaagaggagggagttaacaagttctcttatccaccatcacaccgggagtgttgtccagccgtggaggaggaggacgatgaagaagctgtaaagaaagaagctcacagaacctctacttctgccttgtctccaggatccaagcccagcacttgggtgtcttgcccaggggaggaagagaatcaagccacggaggataaaagaacagaaagaagtaaaggagccaggaagacctccgtgtccccccgatcttcaggctccgaccccaggtcctgggagtatcgttcaggagaggcgtccgaggagaaggaggaaaaggcacacaaagaaactgggaaaggagaagctgccccagggccgcaatcctcagccccagcccagaggccccagctcaagtcctggtggtgccaacccagtgatgaagaggagggtgaggtcaaggctttgggggcagctgagaaggatggagaagctgagtgtcctccctgcatccccccaccaagtgccttcctgaaggcctgggtgtattggccaggagaggacacagaggaagaggaagatgaggaagaagatgaggacagtgactctggatcagatgaggaagagggagaagctgaggcttcctcttccactcctgctacaggtgtcttcttgaagtcctgggtctatcagccaggagaggacacagaggaggaggaagatgaggacagtgatacaggatcagccgaggatgaaagagaagctgagacttctgcttccacaccccctgcaagtgctttcttgaaggcctgggtgtatcggccaggagaggacacggaggaggaggaagatgaggatgtggatagtgaggataaggaagatgattcagaagcagccttgggagaagctgagtcagacccacatccctcccacccggaccagagggcccacttcaggggctggggatatcgacctggaaaagagacagaggaagaggaagctgctgaggactggggagaagctgagccctgccccttccgagtggccatctatgtacctggagagaagccaccgcctccctgggctcctcctaggctgcccctccgactgcaaaggcggctcaagcgcccagaaacccctactcatgatccggaccctgagactcccctaaaggccagaaaggtgcgcttctccgagaaggtcactgtccatttcctggctgtctgggcagggccggcccaggccgcccgccagggcccctgggagcagcttgctcgggatcgcagccgcttcgcacgccgcatcacccaggcccaggaggagctgagcccctgcctcacccctgctgcccgggccagagcctgggcacgcctcaggaacccacctttagcccccatccctgccctcacccagaccttgccttcctcctctgtcccttcgtccccagtccagaccacgcccttgagccaagctgtggccacaccttcccgctcgtctgctgctgcagcggctgccctggacctcagtgggaggcgtggctgagaccaactggtttgcctataatttattaactatttattttttctaagtgtgggtttatataaggaataaagccttttgatttgt

SEQ ID NO: 996 - DNA, 5221 bp, Homo sapiens
cgcaagggcttctaagaagccatcccaatgaccttttggctttgagaagagcagtcctcataccagagtgtttggggttttggcctctttcagtgtttattcattcttacgtgggaaagttgtattccgaggtttctgtggtgcatgaagcttttgccttcaccatctgttcccgtgtcttcctcgggtgacatcagagtacagcagtattttcccttgccatctaatggggtttgggctgtttgactcaaccgtgtgtgttcctcaatgccaggggaataatcctaccctaagtcagctgaacagaagccaggatctaactgcaaacaagagacccagcttgcttaacagcatggaagagaaccagtttccttgcagctacctgggaagacggttgctaattagcctgcaacaaagagttccttgctcatctaaaagaggcaatcaccgttcaggtgaagctttgttctaagaatatttgtttcatctagtttatgagtccaaatgatatagactgtaaatgtcacagcagtggtgaaagactgctcggtcatgagcaccgacagtaactcactggcacgtgaatttctgaccgatgtcaaccggctttgcaatgcagtggtccagagggtggaggccagggaggaagaagaggaggagacgcacatggcaacccttggacagtaccttgtccatggtcgaggatttctattacttaccaagctaaattctataattgatcaggcattgacatgtagagaagaactcctgactcttcttctgtctctccttccactggtatggaagatacctgtccaagaagaaaaggcaacagattttaacctaccgctctcagcagatataatcctgaccaaagaaaagaactcaagttcacaaagatccactcaggaaaaattacatttagaaggaagtgccctgtctagtcaggtttctgcaaaagtaaatgtttttcgaaaaagcagacgacagcgtaaaattacccatcgctattctgtaagagatgcaagaaagacacagctctccacctcagattcagaagccaattcagatgaaaaaggcatagcaatgaataagcatagaaggccccatctgctgcatcattttttaacatcgtttcctaaacaagaccaccccaaagctaaacttgaccgcttagcaaccaaagaacagactcctccagatgctatggctttggaaaattccagagagattattccaagacaggggtcaaacactgacattttaagtgagccagctgccttgtctgttatcagtaacatgaacaattctccatttgacttatgtcatgttttgttatctttattagaaaaagtttgtaagtttgacgttaccttgaatcataattctcctttagcagccagtgtagtgcccacactaactgaattcctagcaggctttggggactgctgcagtctgagcgacaacttggagagtcgagtagtttctgcaggttggaccgaagaaccggtggctttgattcaaaggatgctctttcgaacagtgttgcatcttctgtcagtagatgttagtactgcagagatgatgccagaaaatcttaggaaaaatttaactgaattgcttagagcagctttaaaaattagaatatgcctagaaaagcagcctgacccttttgcaccaagacaaaagaaaacactgcaggaggttcaggaagattttgtgttttcaaagtatcgtcatagagcccttcttttacctgagcttttggaaggagttcttcagattctgatctgttgtcttcagagtgcagcttcaaatcccttctacttcagtcaagccatggatttggttcaagaattcattcagcatcatggatttaatttatttgaaacagcagttcttcaaatggaatggctggttttaagagatggagttcctcccgaggcctcagagcatttgaaagccctaataaatagtgtgatgaaaataatgagcactgtcaaaaaagtgaaatcagagcaacttcatcattcgatgtgtacaagaaaaaggcacagacgatgtgaatattctcattttatgcatcatcaccgagatctctcaggtcttctggtttcggcttttaaaaaccaggtttccaaaaacccatttgaagagactgcagatggagatgtttattatcctgagcggtgctgttgcattgcagtgtgtgcccatcagtgcttgcgcttactgcagcaggcttccttgagcagcacttgtgtccagatcctatcgggtgttcataacattggaatatgctgttgtatggatcccaaatctgtaatcattcctttgctccatgcttttaaattgccagcactgaaaaattttcagcagcatatattgaatatccttaacaaacttattttggatcagttaggaggagcagagatatcaccaaaaattaaaaaagcagcttgtaatatttgtactgttgactctgaccaactagcccaattagaagagacactgcagggaaacttatgtgatgctgaactctcctcaagtttatccagtccttcttacagatttcaagggatcctgcccagcagtggatctgaagatttgttgtggaaatgggatgctttaaaggcttatcagaactttgtttttggagaagacagattacatagtatacagattgcaaatcacatttgcaatttaatccagaaaggcaatatagttgttcagtggaaattatataattacatatttaatcctgtgctccaaagaggagttgaattagcacatcattgtcaacacctaagcgttacttcagctcaaagtcatgtatgtagccatcataaccagtgcttgcctcaggacgtgcttcagatttatgtaaaaactctgcctatcctgcttaaatccagggtaataagagatttgtttttgagttgtaatggagtaagtcaaataatcgaattaaattgcttaaatggtattcgaagtcattctctaaaagcatttgaaactctgataatcagcctaggggagcaacagaaagatgcctcagttccagatattgatgggatagacattgaacagaaggagttgtcctctgtacatgtgggtacttcttttcatcatcagcaagcttattcagattctcctcagagtctcagcaaattttatgctggcctcaaagaagcttatccaaagagacggaagactgttaaccaagatgttcatatcaacacaataaacctattcctctgtgtggcttttttatgcgtaagtaaagaagcagagtctgacagggagtcggccaatgactcagaagatacttctggctatgacagcacagccagcgagcctttaagtcatatgctgccatgtatatctctcgagagccttgtcttgccttctcctgaacatatgcaccaagcagcagacatttggtctatgtgtcgttggatctacatgttgagttcagtgttccagaaacagttttataggcttggtggtttccgagtatgccataagttaatatttatgataatacagaaactgttcagaagtcacaaagaggagcaaggaaaaaaggagggagatacaagtgtaaatgaaaaccaggatttaaacagaatttctcaacctaagagaactatgaaggaagatttattatctttggctataaaaagtgaccccataccatcagaactaggtagtctaaaaaagagtgctgacagtttaggtaaattagagttacagcatatttcttccataaatgtggaagaagtttcagctactgaagccgctcccgaggaagcaaagctatttacaagtcaagaaagtgagacctcacttcaaagtatacgacttttggaagcccttctggccatttgtcttcatggtgccagaactagtcaacagaagatggaattggagttacctaatcagaacttgtctgtggaaagtatattatttgaaatgagggaccatctttcccagtcaaaggtgattgaaacacaactagcaaagcctttatttgatgccctgcttcgagttgccctcgggaattattcagcagattttgaacataatgatgctatgactgagaagagtcatcaatctgcagaagaattgtcatcccagcctggtgatttttcagaagaagctgaggattctcagtgttgtagttttaaacttttagttgaagaagaaggttacgaagcagatagtgaaagcaatcctgaagatggcgaaacccaggatgatggggtagacttaaagtctgaaacagaaggtttcagtgcatcaagcagtccaaatgacttactcgaaaacctcactcaaggggaaataatttatcctgagatttgtatgctggaattaaatttgctttctgctagtaaagccaaacttgatgtgcttgcccatgtatttgagagttttttgaaaattattaggcagaaagaaaagaatgtttttctgctcatgcaacagggaactgtgaaaaatcttttaggagggttcttgagtattttaacacaggatgattctgattttcaagcatgccagagagtattggtggatcttttggtatctttgatgagttcaagaacatgttcagaagagctaacccttcttttgagaatatttctggagaaatctccttgtacaaaaattcttcttctgggtattctgaaaattattgaaagtgatactactatgagcccttcacagtatctaaccttccctttactgcacgctccaaatttaagcaacggtgtttcatcacaaaagtatcctgggattttaaacagtaaggccatgggtttattgagaagagcacgagtttcacggagcaagaaagaggctgatagagagagttttccccatcggctgctttcatcttggcacatagccccagtccacctgccgttgctggggcaaaactgctggccacacctatcagaaggtttcagtgtttccctgtggtttaatgtggagtgtatccatgaagctgagagtactacagaaaaaggaaagaagataaagaaaagaaacaaatcattaattttaccagatagcagttttgatggtacaggtatgatgacaggattatctgatttgtacacaaagattgttttcagactataattttccttgagccgtaaaaatgtggtagtgttcttaacactcttaacatgttattcaccttaaagatcctact

SEQ ID NO: 997 - DNA, 292 bp, Homo sapiens
  misc_feature (243)..(243): n is a, c, g, or t
  misc_feature (245)..(245): n is a, c, g, or t
  misc_feature (258)..(258): n is a, c, g, or t
  misc_feature (264)..(264): n is a, c, g, or t
  misc_feature (268)..(268): n is a, c, g, or t
  misc_feature (274)..(274): n is a, c, g, or t
  misc_feature (278)..(278): n is a, c, g, or t
  misc_feature (282)..(282): n is a, c, g, or t
cctctggattcaccttcaatcactatagcatgaactgggtccgccaggctccagggaaggggctggagtgggtctcatccattagtagtaatagtacttacatatactacgcagactcagtgaagggccgattcaccatctccagagacaacgccaagaactcactgtctctgcaaatgaacagcctgagagccgaggacacggctgtgtattactgtgcgagatattcctaccaccaggtgnanttctatgactacnggggcngggnaccctngtcnccgnccaatagtaa

SEQ ID NO: 998 - DNA, 803 bp, Homo sapiens
  misc_feature (4)..(5): n is a, c, g, or t
  misc_feature (11)..(11): n is a, c, g, or t
  misc_feature (19)..(20): n is a, c, g, or t
  misc_feature (39)..(39): n is a, c, g, or t
  misc_feature (245)..(246): n is a, c, g, or t
  misc_feature (310)..(310): n is a, c, g, or t
  misc_feature (312)..(312): n is a, c, g, or t
  misc_feature (340)..(340): n is a, c, g, or t
  misc_feature (403)..(403): n is a, c, g, or t
  misc_feature (435)..(435): n is a, c, g, or t
  misc_feature (442)..(442): n is a, c, g, or t
  misc_feature (448)..(448): n is a, c, g, or t
  misc_feature (466)..(466): n is a, c, g, or t
  misc_feature (469)..(481): n is a, c, g, or t
  misc_feature (485)..(488): n is a, c, g, or t
  misc_feature (490)..(492): n is a, c, g, or t
  misc_feature (496)..(496): n is a, c, g, or t
  misc_feature (502)..(523): n is a, c, g, or t
  misc_feature (527)..(527): n is a, c, g, or t
  misc_feature (529)..(529): n is a, c, g, or t
  misc_feature (534)..(556): n is a, c, g, or t
  misc_feature (558)..(561): n is a, c, g, or t
  misc_feature (563)..(587): n is a, c, g, or t
  misc_feature (589)..(595): n is a, c, g, or t
  misc_feature (597)..(604): n is a, c, g, or t
  misc_feature (606)..(645): n is a, c, g, or t
  misc_feature (647)..(657): n is a, c, g, or t
  misc_feature (659)..(668): n is a, c, g, or t
  misc_feature (670)..(692): n is a, c, g, or t
  misc_feature (694)..(706): n is a, c, g, or t
  misc_feature (708)..(721): n is a, c, g, or t
  misc_feature (723)..(730): n is a, c, g, or t
  misc_feature (732)..(740): n is a, c, g, or t
  misc_feature (743)..(752): n is a, c, g, or t
  misc_feature (754)..(774): n is a, c, g, or t
  misc_feature (776)..(802): n is a, c, g, or t
gggnntggctnctccatgnncatgctcagctggcagagnaatgaagaagaaggtagtggtggcggaggcagtgaagaggatcccccctgcagacaccaaagctgtgaacagaaagactgcctggccagcaaaccttgggacatcagcctggcccagcctgaaagcatccgcagtgacctagagagttctgatgcacagtcagacgatgtgccagacatcacctcagatgagtgtggctccccccnntcccatactgcagcctgcccctcgacccccagagcccaaggtgcaccgagcccaagtgcccatntnaacctctctgccctagacgagggacaanctgtcttgaagccagaaggtggagaagccagagtatgaagtgggaatgaatgctcctgttctnagaagcacacttggtttctgcatcttttgggnattcaanttgggncttacccgtttatttttnaannnnnnnnnnnnntttnnnncnnntttncttttnnnnnnnnnnnnnnnnnnnnnntttntnttttnnnnnnnnnnnnnnnnnnnnnnntnnnntnnnnnnnnnnnnnnnnnnnnnnnnntnnnnnnntnnnnnnnntnnnnnnnnnnnnnnnnnnnnnnnnnnnnnnnnnnnnnnnntnnnnnnnnnnntnnnnnnnnnntnnnnnnnnnnnnnnnnnnnnnnntnnnnnnnnnnnnntnnnnnnnnnnnnnntnnnnnnnntnnnnnnnnnttnnnnnnnnnntnnnnnnnnnnnnnnnnnnnnntnnnnnnnnnnnnnnnnnnnnnnnnnnnt

SEQ ID NO: 999 - DNA, 595 bp, Homo sapiens
  misc_feature (490)..(490): n is a, c, g, or t
  misc_feature (497)..(497): n is a, c, g, or t
  misc_feature (510)..(510): n is a, c, g, or t
ttcacagttaaataccatgtttaatcatcccacaatggacagtagtgcagtagtagaaattataagtgtctctttaaaaagtcactcccccaaagtttccattccccaatacccagataaccatggtggaacagggccagggtgagggggactcaggaagtcttggttccaaggagatgaaagtctttccaagtcaaatttgccttgtgagcagccaagagcccaatgagttgatgcatacgcgctcactctaacacgcacacatgcaagggacacagaacacatacagatggagggacagagaggggaccacagcggggccatcgcacacatgcgctctcatgccacaacattccagtccatctggggctatctcctctgggggacagggagcggtggcctaagcccgaagcagcaggtgccggtcagatggaaagagggaagccgtctgtccagcctggctgctctgaaaagggcctggcagcgaganaggccanccgccatccctgncaaagtcaatcctccctaatctcgggccggatggagaaagagtgggctccatgttaagggggggccaatatcattcttttttttt

SEQ ID NO: 1000 - DNA, 587 bp, Homo sapiens
tttttggttacaacatactttatctttaaaagggtgtgagagtagttggggaacttagaaattctgtgacttaggtgtgggtggatcttatttaggaagactaaagctatggacacaacacgtgaaagaaccactcagaagcagccctaggaagcccaggtgcccacatcgaaagcactcccaggtgaaagcagccaggcaggcgtgggcattgtacaaccagcctcaggcctcagttcttgattgtggttgacggggcgtcaccatgaaggagcccatttagtataaagcttccaaccttttctcttaatcgtttctttaatcttttaaaccatcttcaagtgcataggggagtttccgatgccagaggatgaaagcaagtgctttctccaccctctcctcccagagtgaaaacaaatccttttgctgatacttgtttcaaaagcatccattgtaaagcttctcagtgacacaaaatactgagaggtaactttttatcaatcaaaccacataccccaatttaacacctttcagtgcctgaattcaactgacagactaaagggtgtttcctgtaacagctgaaatat

SEQ ID NO: 1001 - DNA, 641 bp, Homo sapiens
  misc_feature (562)..(562): n is a, c, g, or t
  misc_feature (573)..(573): n is a, c, g, or t
  misc_feature (578)..(578): n is a, c, g, or t
  misc_feature (595)..(595): n is a, c, g, or t
  misc_feature (619)..(619): n is a, c, g, or t
  misc_feature (629)..(629): n is a, c, g, or t
ataaatcgtttctaagaaaagtaaaagctcttttgaggcacaagataaagaggtttagctaatgaggagggtaacgaacctaactggaaaagtactgctaagggacatataataagaggtagcagattcagagagttggaggaaagtcactgaaatgatgaagttcttaatcttattatctctcacaaacccaaaataaatttaaaataattctaagtgattgaaaacatgaataaagaagtattttctattcatggaacaaatttcaaggtgatacaaatacagaaaacccacaagtactagcactaaaattataatgacattatttctataataaaaatttatgtcatattcttataaaggaaataattaaactagtctggaagatgctattaccttttagggatctgttttagcactgcagctcagaaaacagaaaggatttgtttaaggaaagtagagctggagaccacacaattctctgattggccaaactctgcatgagtcagccaggtgctccctcctcaccaggtgatctagtggggaagagatggggtagccntggcatggganggaanggaaaacctgacatgcnggtttcatgtctgcacctgatagnccggccggcnctttatgtgact

SEQ ID NO: 1002 - DNA, 443 bp, Homo sapiens
  misc_feature (237)..(237): n is a, c, g, or t
  misc_feature (257)..(257): n is a, c, g, or t
  misc_feature (270)..(270): n is a, c, g, or t
  misc_feature (291)..(291): n is a, c, g, or t
  misc_feature (380)..(380): n is a, c, g, or t
  misc_feature (419)..(419): n is a, c, g, or t
cagtgctattttatccaatttttggctttatatttttctatcttctatacttctccaatacttgtcttagcttgtttttcattttctatctgaaactcttgacaatattttcattttctatcttgtttctatcttccaattttcttctaagtttcgtacattttgcccttagctttttgtttcctagcttgtcttttttcttctgcttcctacttttcaggtttaaatttatctttnttcttctaaaagtatgtttntatcttctaattnccctatcttctctattctttncttcgccttcccgtacttctgtcttccagttttccacttcaaacttctatcttctccaaattgtttcatcctaccactcccaattaaanctttccattttcgtctggcgtttagtaaatgcgttaacnagggcttgaaatggacggcaattc

SEQ ID NO: 1003 - DNA, 471 bp, Homo sapiens
  misc_feature (354)..(354): n is a, c, g, or t
  misc_feature (387)..(387): n is a, c, g, or t
  misc_feature (407)..(407): n is a, c, g, or t
  misc_feature (424)..(424): n is a, c, g, or t
ttgagaaattagagggattttagttatcattaaaggaaaaaactcacaaattgatcccatttgttccatggggaagaaaagtattataaaaggaaataacttgatttttaggtttgaagggggtcccaatctaataataaaagtcttttgataaaaccatcataaaaataaaaactaatttaaaatataactgccagtgttttttaggatttaaaaaggtgagatgttccaggtttaagcaaatggttccttgggttgccaaatgcattcccatgagtgtttcttaggctgagggaatagagagccatgctccaatctgtttaccccgtaaggactggaaattcaacttacatngtacacattttaaagaccttgcccccagttccnatgggtcagcctcaagtacngggagatttaggccacngggcctgtgtaccggcatggggaagcccgtcttcaactcttttcaac

SEQ ID NO: 1004 - DNA, 458 bp, Homo sapiens
  misc_feature (458)..(458): n is a, c, g, or t
aagaaggcagtacccaaagacaactaattcttaggtgcaatcgcagaatttgcatttataaaattgtagtattcacatttctttctaaagtatgactgttcatttagatcaaatgactgttctaacataattaagccaatttttcccctaaatgttctcctgaacattaaacacatacataatagcagttaaatattggctcctttagcttggaagaactttacaggcaattagattgtgccagttttcaaataggagatcagttccgttagtagttctatttttttcattcaactcgtggaacaagggtcaacaaattgggtctgcgggccaaatccaccctgccacctgttttcggcatggcctgcaaagtaagaatggtttttacgttttcagcggttggaaaaagatcaaaagttgatgctttggtgatatatgaaaagtataccaaattcatn

SEQ ID NO: 1005 - DNA, 530 bp, Homo sapiens
  misc_feature (323)..(323): n is a, c, g, or t
  misc_feature (325)..(325): n is a, c, g, or t
  misc_feature (327)..(328): n is a, c, g, or t
  misc_feature (338)..(339): n is a, c, g, or t
tctccatcttaagtgcccctcaaaggggacaagaagggggcaaaagaagtttaatgcgcatcccctaagaggtgtggaaacgtctttctgccgagggacagaggaggtagaactgcccctctaagaattgcagcagctctacaaggaatcggggagaggaaaagggtagaatgagagggaaaaggatgttctttagcaacctcactcctttgatccattcatcctgtccggggtaaggggtggtcccagtgtatcggtggggcataaaaaggggagtaaagcctggaggaagaaatgaaaggtgggagagcaatctggtggtntntnnggggaaaatnnagccctaactcattggccctcatcttcttccaagaagttggcatcaacatacaagaggcatgaatggatagactctgggggagttcagggctcctaaataagggaaagagaaggggcgacaagggccctgtggtttcctggtgttcgtaagtgaatgtgctccagttagagcaacaggatgttgggggaat

SEQ ID NO: 1006 - DNA, 989 bp, Homo sapiens
tggcttcggcagcggcttcagcagatcggcggcatcagcggtagcaccagcactagcagcatgttgagccgggcagtgtgcggcaccagcaggcagctggctccggctttggggtatctgggctccaggcagaagcacagcctccccgacctgccctacgactacggcgccctggaacctcacatcaacgcgcagatcatgcagctgcaccacagcaagcaccacgcggcctacgtgaacaacctgaacgtcaacgaggagaagtaccaggaggcgttggccaagggagatgttacagcccagatagctcttcagcctgcactgaagttcaatggtggtggtcatatcaatcatagcattttctggacaaacctcagccctaacggtggtggagaacccaaaggggagttgctggaagccatcaaacgtgactttggttcctttgacaagtttaaggagaagctgacggctgcatctgttggtgtccaaggctcaggttggggttggcttggtttcaataaggaacggggacacttacaaattgctgcttgtccaaatcaggatccactgcaaggaacaacaggccttattccactgctggggattgatgtgtgggagcacgcttactaccttcagtataaaaatgtcaggcctgattatctaaaagctatttggaatgtaatcaactgggagaatgtaactgaaagatacatggcttgcaaaaagtaaaccacgatcgttatgctgagtatgttaagctctttatgactgtttttgtagtggtatagagtactgcagaatacagtaagctgctctattgtagcatttcttgatgttgcttagtcacttatttcataaacaacttaatgttctgaataatttcttactaaacattttgttattgggcaagtgattgaaaatagtaaatgctttgtgtgattgaaaaaaaaaaaaaaaaaaaaaaaaaaaaaaaaaaaaaaaaaaaaaaa

SEQ ID NO: 1007 - DNA, 6503 bp, Homo sapiens
aagcttgctaattagaggaaagtcaggaaatgggaaccattcaaagaagaaaatacccccacctcctactctcacctatccaaagacaattaggtgaatcccttagtagatatctttccagacggttttccatatagattcccatatctggccaggcgcggtggctcacacctgtaatcctagcgcttggggaggctgaggcggatggaccacctgaggtcaggagttcgagaccagcctgaccaacatggagaaacctcgtctctacgaaaaatacaaaattagccgggcacagtggtgcaagcctgtaatcccagctactcaggaggccgaggcaggagaattgcttgaacctaggaggcagacattgtgctgagccgagccaagatcatgccattgcactaaactccgccttaaaaaaaaaaaaaaaagattcccacatctttactagtttgcagaaataagatcctagcatatgcagtgtgtaggaaccaccttggtttagccacgtctctgtgactgggggccactgtggtgacccccagctccccggacagagtcaagagctcaccagcctgcaaaggttttcacggcccccagccagactcgggggcttcctcttgccctgctacttcctgggagctctgagggcaggaaatggcgccactcagctcctggcctaacagcttggggaccacaaatgcaaaggaaaccaccctcccctcccacctcctcctctgcacccttgagttctcaggctcacattcccaccacccacctctgagcccagccctccctagcatcaccacttccatcccattcctcagccaagagccaggaatcctgattccagatcccacgcttccctgcctccctcaggtgagccccagacccccaggcaccccgctggcccctgaaggagcaggtgatggtgctgtcttcgcccagcagctgtgggagcaggcgggtggggcaggatggaggggtgggtggggtgggtggagccagggcccacttcctttccccttggggccctgtccttcccagtcttgccccagcctcgggaggtggtggagtgacctggccccagtgctgcgtccttatcagccgagccggtaagagggtgagacttggtggggtaggggcctcagtgggcctgggaatgtgcctgtggcttgaaaagactctgacaggttatgatgggaagagattgggagccattgggctgcacagggtcagggaaggccaggaggggctggtcactgctggaatctaagctgctgaggctggagggagcctcaggatggggctgatgggggagctgccagcatctgttcctctgtcatttctgataacagtaaaagccagcatggaaaaaaccgttaaaccgcaggttgggcctggccgttggcagggaagtgggcagaggggaggcccggccaggtcctccggcaactcccgcgtgttctgcttctccggctgcccacctgcaggtcccagctcttgctcctgcctgtttgcctggaaatggccacgcttctccttctccttggggtgctggtggtaagcccagacgctctggggagcacaacagcagtgcagacacccacctccggagagcctttggtctctactagcgagcccctgagctcaaagatgtacaccacttcaataacaagtgaccctaaggccgacagcactggggaccagacctcagccctacctccctcaacttccatcaatgagggatcccctctttggacttccattggtgccagcactggttcccctttacctgagccaacaacctaccaggaagtttccatcaagatgtcatcagtgccccaggaaacccctcatgcaaccagtcatcctgctgttcccataacagcaaactctctaggatcccacaccgtgacaggtggaaccataacaacgaactctccagaaacctccagtaggaccagtggagcccctgttaccacggcagctagctctctggagacctccagaggcacctctggaccccctcttaccatggcaactgtctctctggagacttccaaaggcacctctggaccccctgttaccatggcaactgactctctggagacctccactgggaccactggaccccctgttaccatgacaactggctctctggagccctccagcggggccagtggaccccaggtctctagcgtaaaactatctacaatgatgtctccaacgacctccaccaacgcaagcactgtgcccttccggaacccagatgagaactcacgaggcatgctgccagtggctgtgcttgtggccctgctggcggtcatagtcctcgtggctctgctcctgctgtggcgccggcggcagaagcggcggactggggccctcgtgctgagcagaggcggcaagcgtaacggggtggtggacgcctgggctgggccagcccaggtccctgaggagggggccgtgacagtgaccgtgggagggtccgggggcgacaagggctctgggttccccgatggggaggggtctagccgtcggcccacgctcaccactttctttggcagacggaagtctcgccagggctccctggcgatggaggagctgaagtctgggtcaggccccagcctcaaaggggaggaggagccactggtggccagtgaggatggggctgtggacgccccagctcctgatgagcccgaagggggagacggggctgccccttaagtgtcggtgaatagtgaggctggaggccggaatctcagccagcctccagcaccttccctctcaccatcccactgccccctcgctcccatgtttccacccggcaccctgatcctcacccgaatctcctttttttttttcttttgagacagagtttcgctttgtcgcccaggctggagtgcaatgcacgatctcagttcactgcaacctctgcctcctaagttcaggcgattctcctgcctcagcttcccgagtaactgagattacaggcacccaccaccatgcccagctgcttttttgtatttttggtagagatggggtttcaccatgttggctaggctggtctcaaactcctgacctcaggtgatctacctgcctcagcctcccaaagtgctgagattacagacatgagcctccgcgccttgcctcctcacccacctcttcactctgaatcctcatgaggcttctcagccctggatttcctgctgccatcctcacccagcacccacaactagcgcctgggcagggcagggctggcacctctcaacgtctgtggactgaatgaataaaccctcctcatccacccctatttatctccatcaccatttccccctctttcttgttcctggaaacggctgctgagtctccatcggccaaacttatctgccctgtgatttctttgacaattctccttttcccccagaacccaccctgggttgaccagagtctgggaagaaggacaagagaacccggcaaactccctcctaggattaactttgtaaagcacccttgccctgtagctgcaagggctgtggaacctgggcagcccgcaaccacctttagctctgggccccccaggccagcctggagcatggctgggtggggccaccagcccatgctctcaggcgggcctgtgatctttcccagggcacatggactgtaggctggccctggcccacaccaccacactctccccagccatggacagaggcagccagaggcctcacggtttctcctccgagtttctggctgggtgtagttctcagaaaccccagtgcctgcgtgtgtccactcgtgggtgtggtttgtgtgcaagagctgaggatttggcgatgcttgggaggggtagttgtgggtacagacggtgtgggggtgggaagtggtgcagagactgaagagggtcaacctgggcatgggggacacagggactgctgagaacgtgcgtgtcatctttgctctgatggggtggacatagcagaaaatctaactctgtctgtagccccatacagaatgccagggtgagcacagtggctggtgcctttaatcccagcactttggaaagttgaggcaggaggatcgcttgagcccaggagttcgagtctgaagtgagctgtgattgcaccactgcacttcagcctgggcaacagagtgagcccctgtctcaaaaaagaaaagaaaaagaaagccaggcttcatggaaagatcgtatgtgtgacccaaatatgagttcttcagctcagccatggtaatcccttccttgaagtctccatttctgcagtacacatgcatgtgcgctctctctctctctctctctctcacacacacacacacacacacacacacgcgcgcgcgcgcgcgcgcgcgcgctctcctgcgaacagaggcagggggagaggggtttgccctggtctcggggactggtctggctggcgcttccccactgcacgtttccaggtttagtttgtctgtgtctcctcttccatcccaggggctgagccccttccatcctccaagaggaaccagtgagagtgagtgaaggaggggcctggagccagggacttcccctgtggggcctgggtggagaggggagaactcaatggtgctgcctttgagaccagcccagctacagcccaggagcacacatgggccagggcagttggtatttcccgaggacaaagaggaaattttcaaagaggaagttgttgagttagagcttgcggtggctgagagcagacaggttgacctgcaaaaaaagacaggggaggcatgtgagtgtgacagccctgctctgtggcctgggcaggagatgggggaaagggtcaggtgggggatgggctcgtgcagtgggagaggagacggagggagggagcgggaaggggcttgcttagtgggtgggaagagctgagctcggatggaaccagcttctaccagccaggctgggcacccactgggctgcatctggtggccttttctgattgctatttggactcactgcagctgcagaatgacagaggccatgtccaaaatcccttagagacactgttgtcttagagttgttaaaataagagcccccatatcaggtttagaaaatactgtcaccgaacgaacgtcgctgtcctcagctccacctccctttcctttgacagatatggttgttttctaagccaggactggttttagtcaggtcctgggcgaatcctgaaaaaaagaggtagtacgggtaaggaaggcacccaacagggctttcacaatccagaaaatatcaaaatataagtgttaaaagagaggcacaggccgggtgcggtggctcacgcctgtaatctcagcactttgggaggccaaggtgggcagatcatgaggtcaggagtttgagaccagcctggccaatatgatgaaaccccgtttctactaaaaatacaaaagttagccaggcatggtggtgtgctcctgtaatcccagctacttaggaggctgaggccagagaattgcttgaaccctggagtcagaggttgcagtgagccgggatcatgccactgtactccaggctgggtgacaaagtgagactgtctcaaaaaataaaaataaataaaataaataaaagagaggcacaaacagtgttatgaatgcaccaaggaaaatggtgcattcataactctcaggtgaagcctaccaagccatgcgtgtgtgcacatatgtgtgtacgtgtgcatgtgcgtgcgtgcatgtgcgtgcgtgcatgtgcctgtgtgtgtatgtgtgcacatgtgtgtgcgcatgtgtgtgtgtgcgcgcatgtgtgtgtgcatgcatgttctcccatgcatgtgtactgtggcaagggagactttgaggaagagattccagtggctgagcagaagggctcgcattgccctggcgaaaggttggaaggcttcacctgagagtgtgtcgtggcctttgtcatatccactgcttgattcctttctttaaaaattatttttattgttttctacatatgagaaccaccacacctggctaatttttgtattttttgtagagatggggtttcaccatgttgtcccggctggtctcaaactcccgggcacaagagatccacctgcctcagcctcccaaaatgctgggactataggcatgagccactgcacccagccactgcttcattcctggtggctgctgtgcctggcatgttgcagatcctccatgaatatgcatttgaatgaatgaatgaatgaatgaatgaatggagatgacgcctcagagattctttcttttgagatgaggtctcattctgtcacccagactagagggcagtggtgcaatcacagctcaccacagcctcaacctcctgggcctcccaagtagctgcgatcacaggtgtgcaccaacatgcccagctaattttttttttaatttttaatttgtacagacagggtcttgctgtgttgcccaggctggtctcgaactcctgggctcaagtggtcctcccacctaagctt

SEQ ID NO: 1008 - DNA, 803 bp, Homo sapiens
gcctcagccatggcctggaccgttctcctcctcggcctcctctctcactgcacaggctctgtgacctcctatgtgctgactcagccaccctcggtgtcagtggccccaggaaaggcggccaggattacctgtgggggaatcaacattgcaagtaaaagtgtgcactggtaccagcagaagccaggccaggcccctgtgctggtcgtctatggtgatagcgaccggccctcagggatccctgagcgattctctggctccaactctgggaacacggccaccctgaacatcagtagggtcgaagccggggatgaggccgcctattactgtcaggtgtgggatagtagtagtgatcatgtggtattcggcggagggaccaagctgaccgtcctaggtcagcccaaggctgccccctcggtcactctgttcccgccctcctctgaggagcttcaagccaacaaggccacactggtgtgtctcataagtgacttctacccgggagccgtgacagtggcctggaaggcagatagcagccccgtcaaggcgggagtggagaccaccacaccctccaaacaaagcaacaacaagtacgcggccagcagctatctgagcctgacgcctgagcagtggaagtcccacagaagctacagctgccaggtcacgcatgaagggagcaccgtggagaagacagtggcccctacagaatgttcataggttctcaaccctcaccccccaccacgggagactagagctgcaggatcccgggggaggggtctctcctcccaccccaagcatcaagcccttct

SEQ ID NO: 1009 - DNA, 701 bp, Homo sapiens
cggacaatggggacccgggacgacgagtacgactacctattcaaagtggtgctcatcggggactcaggcgtgggcaagagcaacctgctgtcgcgcttcacccgcaacgagttcaacctggagagcaagagcaccatcggcgtggagttcgccacccgcagcatccaggtggacggcaagaccatcaaggcgcagatctgggacaccgctggccaggagcgctaccgccgcatcacctccgcgtactaccgtggtgcagtgggcgccctgctggtgtacgacatcgccaagcacctgacctatgagaacgtggagcgctggctgaaggagctgcgggaccacgcagacagcaacatcgtcatcatgctggtgggcaacaagagtgacctgcgccacctgcgggctgtgccaactgacgaggcccgcgccttcgcagaaaagaacaacttgtccttcatcgagacctcagccttggattccactaacgtagaggaagcattcaagaacatcctcacagagatctaccgcatcgtgtcacagaaacagatcgcagaccgcgctgcccacgacgagtccccggggaacaacgtggtggacatcagcgtgccgcccaccacggacggacagaagcccaacaagctgcagtgctgccagaacctgtgacccctgcgtcctccacccagcgtgcgtgcacgtcctcc

SEQ ID NO: 1010 - DNA, 660 bp, Homo sapiens
ctgaaaaaaatggataaagaaggtaaaacattaaaaaaacataaattgaagcataaagagagggaaaaagaaaagcataaaaaagaaattgaaggtgaaaaggaaaaatacaaaactaaggatagtgccaaagaactgcagaggagtgtggaatttgatagagaattttgggaaagagaatttttttaaaagtgatgaaactgaagatctctttttaaatatggaacatgaatccttaacattagaaaaaaaatcaaaattggaaaaaaacatcaaagatgataaatcaaccaaggaaaagcatgtgtcaaaagagaggaactttaaagaggaacgagacaagattaaaaaggaaagcgagaatttacttctttggggtatgagtgccattgaggaatctatagggcttcatttagtggaaaaggaaatagacattgaaaaacaagaaaagcatataaaggaaagtaaagaaaaacctgagaagcgatctcaaattaaagaaaaggacattgagaagatggaaagaaaaacctttgacaaaggacaagcttatattcgcatcacacagacaaaatggccatacaagaagggtgagaaggagcaaaaatactgctgcttattaaaaaaacctgacggacagagagaaaagtaggagaaagg

SEQ ID NO: 1011 - DNA, 3642 bp, Homo sapiens
ggcacgagctttggctggctagggaggggatgcaatgatataaacatttatcccctgatacctcatgttaaaatctgatgcccactgtgggacgtggggcctaatggccaccatttgggtcatggtgaccaatcttttatgaatagagagatactgccctctcttgggaatgaatgaattgttgctttattattttccaagagagctagttgttaaaaagaccctggcaacttcctactctctctgttcctctgttaccatgtgttctctgcatataccagctcacctttgtcttctgccatgagtggaagcagcctgaggccctcactaaatgcgcaaacatttccagacatcagaatcttgagccacatgaaccttgtttatataaattagtcagtctcagacatttctttatagcaacacaaaatggaaaaagataacactcgcatcacaggtatgtgtctctggcagctagccaccgttcttaagatatccaggatccactcagccaagagtcttctcatcagtactctaaagacacttatcactcaagagagtctaaggtttttaggagaaaccagggacaaagtctaaatgtttttgtgataactcagattgcccacttttctttgaccacatatcttttacaggaaaaaggattgtaacagtaaagaggtattggcatattatcagagtctcatccattcattcaaaattaggccagtttatcatcctcttgtatgaatatgtctcccagaatgaaatcactcagctttgctgacaacactcaatcttaccaggttccaaaaacaagaatggtctcagggacatacagcttcactcttttaggcatccagtataattgacctaagtgacaatatcttctcttgctcacaccacctttgaggagttaagctaatattgaatttttctcattatataaccctttgatttattcacttgccctcagccactattcctccctctgtccctttatatcagttgtttccaggtttgggagtgacattaggtttgtctgctgggctggcctagactgcaggcagcaatagtattctagcatgtcttccctcagtctagtcttgatcatagagggtaggttatataggtaaggaactagtgggggctatcaagaccaccaggctatataactctacttactgttaatcctaacttttccagatgaaatgaatacttgagaattcttacataaaggtataaaaatatagttatggtttttggcttagggataattcctgtttctggcacttttatttacatccctattcctggtactatggcataacatatgaaaaaataaatttgaggtgaagtgtagtctttattccagcatcctctcctcttcagaagaattgtatgtatcgtcataacagcatcgtcctgatccatcaggtaaaagagaggatgctacctagtggagttattcttgcagccccactcatgttgacagcgagcacattcatgaagatataaaagccagtccttcatgtttatattgcccaacaattagattggcagtttttagacaaacaatgtttcaattgaccatttcaattttctatcaaattttcccctgaggaggacatgtccctctgcattgttggccatttgaggctgtaaagtgtgttttcttgtgtaaagaagtgtgactcggcagtccaaattggtgcaatctcttcttttctggttcttgtatagcccttgaagcattgacatctacccctggttgagcatagcccaatccagagtcagtgattttcctgtcaagatccattggcagctcctttggggttgctggcatcattctggcttgccaggtattatgatcaaagccttcccactagagaatctgtcacatctccatctgctgcctctgtctgttttcttgaccaacagtgaaaaaagagattatgagaaataagataaattaccaaaattgtgaacaaaagagagattatcactaatgacccttaggaagttaaaaaacattataagtgaatactctgaaaaacctgaagccaataagttagaccacttggataaaaaggaccaattcgtgcagagatagaaattgccaaaactgacccaaattaactggaaaacctgaagagaactgtgaactaagtcagaaattgaaaaaccttctcaaaaagaaatgccaaagcccagatatcttcactggtgaattctatcaaatattttgaaagctctttcagacaagaagagaggagggaagactttccagcccatttacagaactggcattaccctcatatcaaagtcacagcaagactcacaggaaaagagtgccatacaccagtgtcaccaataaacataaatgaaaacatccttaacaaacattggcagataatacaaagccacataaaaaaggattacactccatgaccaatgggattcatcccaggaacatatggttggattaacatttgaaaatcagttcatggaatgcactgtattaatggaaaaaaagacataattatctcaaaagatgcaggagaaacagttgacaaaaatgttaacatcactcatgttcataagtttcaacaaaataggaatggaggagaccttcttcactctgataaagggcgtctataaaaaacccacagctaaaatcaaacttaatgaagaaagactgaagactgaatgcttttctcctaagatggggatcaatgcaaggatgtccaatcccaccacttttatttaatattatactggagattgtatccagtgcaataaggcagaaaattaaaaattaaaggcatccagataaaaaggaaaacatacaattctattcacagataacatgaccctgtctgtagaattcacaagcagataaaaactggctagcactaataaatgaatccagaagggcccataggatatcaaatcaatataaaaattaattattaacatatttctctatagaagcaatgaaaatctcaactttcctatcacagtagttaccagaagagcgaaataggaataaatttaggaagacagcagtgtttgttcactgaaaataaaaaaacattcctcagagaaattaaaggtctaaataaatggagagatgcgagttggaaagctcgataatactgttaagatggcagttctcccccagtagatctataggttcaacacaatccctatcaaaatcccagcaggattttatagaaaattgacaaaataggccgggcgcggtggctcatgccggtaatcccagcactttgggaggctgaggcgggcggatcatgagatcaggagatccagaccatcctggctaacacggtgaaaccccgtctctactaaaaatacaaaaaattagccgggcgtggtggcaggctcctcgggaggctgaggcagaaaaatggcatgaacccggtaggcagaagttgcagtgagcggagatcgtgccactgcactccagcctgggtgacagagcgagactccgtctcaaaaaaaaaaaaaaaaaaaaagaaaagaaaaaaagaaaagaaaattgacaaaataatcctaaaaatgtatatgaaaatgcagaggatgcagaagggccaacacaaatttggaaaaaaaaaaaaaaaaaaa

SEQ ID NO: 1012 - DNA, 1295 bp, Homo sapiens
gtgaaagagcaggttctgcttctttggtgtagtcctgaagcttcctaagaaacttcacatcaggtgatggataggagcaaccctgtaaaaccagccttagactatttttcaaacaggctggtgaattaccagatctccgtcaagtgcagtaaccagttcaagttggaagtgtgtcttttgaatgcagaaaacaaagtcgtggacaaccaggctgggacccagggccagctgaaggtgctgggtgccaacctctggtggccgtacctgatgcacgaacaccccgcctacctgtactcgtgggaggatggtgattgctcacaccaaagccttggacccctcccagcctgtgacctttgtgaccaactccacctacgcagcagacaagggggctctgtatgtggatgtgatccgtgtgaacggctactactcttggtatcgcaactacgggcacctggagttgattcagctgcagctggccgcccagtttgagaattggtgtaagacatcacaatcccattattcagagcgcgtatggagtggaaacgcttgtagggtttcaccaggtaagcggtgttgaactttctgcttgtgtattctctctgggcagagatgccacttgcctcccccaccatgccatctctgaagaatattacagaccattttggagcatggtgaataagaaattttcaccttaggagttcagttgaatagtcatttttatatttgtgactgcaagtcactcttaggggctgtacttccttagtactggtagcattattatccaatggacttttatagctttcattaggttttcttttgtttttgttctttaaagaacgttttacttatcttagtatttcatttttcatctatattatgaggcagtaagagtcttctgtttttccaaagttgagactgctttatatttatttcgtattgtctacagctgtagtgttcaatacattagccactagccacatgtggttatttaaataagataaaataaaaattggccgggcgtggtgggtcacgccggtaatcccagcactttgggaggccgaggcgggcagatcattaggtcaggagatcgagaccatccttactaagacggtgaacccccatctctattaaaaatacaaaaaattagccgggcgtggtggcgggcgcctgcagtcccagctactcaggaggctgaggcaggagaatggcgtgaacctgggaggcagagtttgcagtgagccgagatggcgccactgcactccagcctggggacagagcgagactccatctcaaaa

SEQ ID NO: 1013 - DNA, 303 bp, Homo sapiens
tatctgtatatggagtactgtgggctggttctgtatctgatcatcattcgattacgaaataaaacgttaacagaagatgaaatagctacaatattacaatcaactcttaagggacttgaataccttcattttatgagaaaaatacaccgagatatcaaggcaggaaatattttgctaaatacagaaggacatgcaaaacttgcagattttggggtagcaggtcaacttacagataccatggccaagcggaatacagtgataggaacaccattttggatggctccagaagtgattcagggtacc

SEQ ID NO: 1014 - DNA, 348 bp, Homo sapiens
  misc_feature (318)..(318): n is a, c, g, or t
attttctcctgaagctgaaaatgtttcacccatataaatgtggcattttagactctagctataaacctcatcgaccagtatgttttcagagttgttcacaacaaaatattattcgtttctaaaatcagttttcactttttggtgatagtattccaggctggactgcttgaattttagatgcagagatcattttatatatatctgtcaatgtaatacagaaaaattacatgtgaattgtttatgtgccccctctacgtaggacacagtatcaatcactcaataagcactgtaacatcaggtggtgtttgggataaatancctctcgggtttcttcaatcccactaccat

SEQ ID NO: 1015 - DNA, 14189 bp, Homo sapiens
atggtggccggcatgctcatgccacgggaccagctgcgggccatctatgaggtgctcttccgcgagggcgtgatggtggccaagaaggaccggcggccccgcagtttgcacccccatgtgcccggcgtcaccaacctgcaggtcatgcgtgccatggcgtccctgcgggcacggggcctggtccgcgagacctttgcctggtgccactttttctggtacctcaccaatgaaggcatcgcccacctccgccagtacctgcacctgccgccagagatcgtggccgcctctctgcagcgcgtgcgccgccccgtcgccatggtgatgcccgcacgccgcaccccccacgtgcaggctgtgcagggtcccctgggctccccacccaagcgggggccgctgccgacggaggagcagcggctctaccgtcggaaggagcttgaggaggtgtcacctgagacccctgtggtgcctgctaccacccagcggaccctggccaggccaggcccggagcctgccccagccacagatgagcgggatcgtgtgcagaagaaaacctccaccaagtgggtcaacaagcacctcatcaaggcccagaggcacatcagtgacctgtatgaagacctccgcgatggccacaacctcatctccctgctggaggtcctctcgggggacagcctgccccgggagaaggggaggatgcgtttccacaagctgcagaatgtccagattgccctggactacctccggcaccgccaggtgaagctggtgaacatcaggaatgatgacatcgctgacgggaaccccaagctgaccctgggcctcatctggacaatcattctgcacttccagatctcagatatccaggtgagtgggcagtcggaggacatgacggccaaggagaagctgctgctgtggtcgcagcgaatggtggaggggtaccagggcctgcgatgcgacaacttcacctccagctggagagacgggcgcctcttcaatgccatcatccaccggcacaagcccctgctcatcgacatgaacaaggtgtaccggcagaccaacctggagaacctggaccaggccttctctgtggcggagcgggacctgggagtgacgcggctcctggaccctgaggacgtggatgtccctcagcccgacgagaagtccatcatcacctacgtctcgtcgctgtatgacgccatgccccgcgtgccggacgtgcaggatggggtgagggccaacgagctgcagctgcgctggcaggagtaccgggagctggtgctgctgctgcttcagtggatgcgacaccacacggccgcctttgaggaacgcaggttcccctccagcttcgaggagattgagatcctgtggtctcagttcctgaagtttaaggagatggagctaccagccaaggaggccgacaagaacaggtccaagggcatctaccaatccctggagggagcggtgcaagcaggccagctcaaggtgccccctggctaccaccccctggatgtggagaaggagtggggcaagctgcacgttgccatcctggagcgggagaagcagctccgcagcgagtttgagaggctggagtgtcttcaacgcatcgtgaccaaacttcagatggaggcggggctgtgtgaggagcaactgcaccaggccgacgcccttcttcagtcggatatccggcttctggctgcaggcaaagttccacaaagggcgggggaggttgagcgggacttggacaaggcggatagcatgatccggcttctcttcaacgacgtgcagaccctcaaggatgggcggcacccgcagggcgaacagatgtaccgcagggtgtaccgtctgcacgagcgcctggtagccatccgcaccgagtacaacctacgcctgaaggcaggcgtggcggcccctgcaacccaggtggcccaggtgactctgcagagtgtgcagaggcgccccgagctggaggactccactctgcgctacctgcaggacctgctggcctgggtggaggagaaccagcaccgtgtggatggcgctgagtggggtgtggacctgcccagcgtggaggcgcagctgggcagccaccgaggcctgcaccagtccatcgaagaattccaggccaagatcgagcgggcacggagtgacgagggccagctctcccccgccacccggggtgcctaccgtgactgcctgggtcggctggacctgcagtacgccaagctgctgaactcctccaaggcccgcctcaggtccctggagagcttgcacagctttgtggcagccgccactaaggagctaatgtggctgaatgagaaggaggaggaggaggtgggcttcgactggagcgaccgcaacaccaacatgaccgccaagaaggagagctactcggcgctgatgcgggagctggagctgaaggagaagaagatcaaggagctccaaaatgctggggaccggctgctgcgggaggaccacccggcccggcccacggtggagtccttccaggcggccctgcagacgcagtggagctggatgctacagctgtgctgctgtatcgaggcacacctgaaggagaacgctgcctactttcagttcttctcagatgttcgggaggccgaggggcagttgcagaaacttcaggaggcactgcgtaggaaaaacagttgtgatcgctccgccaccgtcacccggctggaggacctgctgcaggatgcccaggacgagaaggaacagctgaacgagtacaagggccacctctcaggcctggccaagcgggccaaggccgtcgtgcagctgaagccccgccacccagcccaccccatgcggggccgcctgcccctgctggccgtgtgcgactataagcaggtggaggtgactgtgcacaagggtgacgagtgccagctggtgggccctgcacagccgtcccactggaaggtgctcagcagctccggcagcgaggccgccgtgccctccgtgtgcttcctggtgcccccgcccaaccaggaggtccaggaggccgtcaccaggctggaggcccagcaccaggccctggtcacgctgtggcaccagttgcacgtggacatgaagagccttctggcctggcagagccttcgccgcgacgtgcagctcatccgctcctggtccctggccacgttccgcaccctgaagccagaggagcagcgccaagccctgcacagcctggagctgcactaccaggccttcctgcgggacagccaggacgcgggcggcttcggacccgaggaccggctgatggctgagcgcgagtacggctcctgcagccaccactaccagcagctgctgcagagcctggaacagggtgcacaggaagagtctcgctgccagcgctgcatctccgagctcaaagacatccggctgcagctggaggcctgtgagacgcgcaccgtgcaccgcctgcggctgccgctggacaaagagccggcacgggagtgtgcccagcgcatcgccgagcagcagaaggcacaggcagaggtggaggggctgggcaagggggtcgcccggctctctgccgaggccgagaaggtcttggccctaccagagccatcgcctgcggcccccacgctgcgctcggagctggagctgacgctgggcaagctggagcaggtccgcagcctgtctgccatctacctggagaagctcaagaccatcagcctggtgatccgcggcacgcagggggccgaggaggtgctcagggcccacgaggagcagctcaaggaggcccaggccgtgccggccaccctcccggagctcgaggccaccaaggcctctctgaagaagctgcgggcccaggccgaggcacagcagcccacgttcgacgccctgcgggatgagctgcggggggcacaggaggtgggggagcgactgcagcagcggcacggggagcgggacgtggaggtggagcgctggcgggagcgggtcgcccagttgcttgagcgctggcaggctgtgctggcccagaccgacgtgcggcagcgcgagctcgagcaactgggccgccagctgcgttactaccgcgagagtgcagaccccttgggcgcctggctgcaggacgccaggcggcggcaggagcagatccaggccatgccgctggccgacagccaggctgtgcgggagcagctgcggcaggagcaggccctgctggaggagatcgagcgccacggcgagaaggtcgaggagtgccagaggtttgcgaaacagtacatcaacgccatcaaggactatgaactccagctggtgacgtacaaggcgcagcttgagccggtggcctccccggccaagaagcccaaggtccagtcgggatcagagagtgtcatccaggagtacgtggacctgcgtacgcactacagcgagctgaccacactgacgagccagtacatcaagttcatcagcgagactctgcggcgcatggaggaggaggagaggctggctgagcagcagcgggcagaggagcgcgagcggctggccgaggtggaggccgcgctggagaagcagcggcagctggccgaggcgcacgcccaggcaaaggcacaggcggagcgggaggcgaaggagctgcagcagcgcattcaggaggaggtggtgcggcgggaggaggcggcggtggacgcccagcagcagaagcgcagcattcaggaggagctgcagcagctgcggcagagctcggaggcggagatccaggccaaggcccggcaggcagaggcggctgagcgcagccggctgcgcatcgaggaggagatccgcgtggtgcgcctgcagttggaggccaccgagcgccagcgtggcggggctgagggggagctgcaggcactgcgtgcacgggcggaggaggctgaggcacaaaagcgacaggcgcaggaggaggccgagcgcttgcggaggcaggtgcaggacgagagccagcgtaagcggcaggcggaggtggagctggcctcgcgcgtgaaggccgaggccgaggcggcgcgcgagaagcagcgggccctgcaggccctggaggagctgcggctgcaggcggaggaggcggagcggtggctgtgccaggccgaggtggagcgagcgcggcaggtacaggtggccctggagacggcgcagcgcagtgcagaggcggagctgcagagcaaacgcgcctccttcgccgagaagacggcacagctggagcgctccctgcaggaggaacacgtggctgtggcacagctgcgggaggaggctgagcggcgggcacagcagcaggccgaggccgagcgggcgcgtgaggaggcagagcggcagctggagcgctggcagctcaaggccaacgaggcgctacggctgcggctgcaggcggaggaggtgctgcagcagaagagcctggcgcaggccgaggctgagaagcagaaggaggaggcggagcgcgaggcgcggcggcgcggcaaggcggaggagcaggccgtccggcagcgggagctggctgaacaagagctggagaagcagcggcagctggcggaaggcaccgcgcagcagcgcctggccgcggagcaggagttgatccggctgcgggccgagacggagcagggggagcagcagcggcagctgctggaggaggagctggcccggctgcagcgtgaggcggctgcagccacgcagaaacggcaggagctggaagccgagctggccaaggtgcgggccgagatggaggtgctgctggccagcaaggcgaaggctgaggaggagtcgcgctccaccagcgagaagtccaagcagaggctggaggccgaggccggccggttccgcgagctggccgaggaggccgcccgcctgcgtgccctggcggaagaggccaagcggcagcggcagctggccgaggaagacgcggcgcggcagcgggccgaggcggagcgggtgcttgcggagaagctggccgccatcggcgaggccacgcggctcaagacggaggcggagatcgcgctcaaggagaaggaggcggagaacgagcgcctgcggcggctggcggaggacgaggccttccagcggcggcggctggaggagcaggccgcgcaacacaaggctgacatcgaggagcgcctggcccagctgcgcaaggcatcggacagcgagctggagcggcagaaggggctggtggaggacacgctgaggcagcggcggcaggtggaggaggagatcctggcgctgaaggcgagcttcgagaaggcggccgctggcaaggcggagctggagctggagctgggacgcatccgcagcaacgcggaggacacgctgcgcagcaaggagcaggccgagctggaggctgcgaggcagcggcagctggcggcggaggaggagcggcggcgccgtgaggctgaggagcgcgtgcagaagagcctggcggccgaggaggaggccgcacggcagcggaaggcggcgctggaggaagtcgagcggcttaaagccaaggtggaggaggcgcggtcgctgcgggagcgagcggagcaggagtcggcgcggcagctgcagctggcccaggaggccgcccagaagcggctgcaggcggaagagaaggcacacgccttcgcggtgcagcagaaggagcaggagctacagcagacgctgcagcaggagcagagcgtgctggaccggctgcgcggcgaggcggaggcggcccggcgggcggctgaggaggcggaggaggcccgggtgcaggcggagcgtgaggcggcgcagtcccggcggcaggtggaagaggccgagcggctgaagcagtcggcagaggagcaggcacaggcccgggctcaggcacaggcggctgcagagaagctgcgcaaggaggccgagcaagaggcggcgcggcgggcacaggcggagcaggcggccctgcggcagaagcaggcagctgacgcggagatggagaagcataagaaattcgccgagcagacgctgcggcagaaggcgcaggtggagcaggagctgacaacactgcggctgcagctggaggagaccgaccaccagaagaacctgctggacgaggagctgcagcggctgaaggcggaggccacggaggccgcacgccagcgcagccaggtggaggaggagctcttctcggtgcgcgtgcagatggaggagctgagcaagctcaaggcacgcatcgaggctgagaaccgcgcactcatcttgcgtgacaaggacaatacgcagcgcttcctgcaggaggaggctgagaagatgaagcaggtggcggaggaggccgcgcggctgagtgtggcggcccaagaggctgcgcgactgcggcagctggcagaggaggacctggcacagcagcgggccttggcagagaagatgctcaaggagaagatgcaggcggtgcaggaggccacgcgactcaaggctgaggcggaactgctgcagcagcagaaggagcttgcgcaggagcaggcgcggcggctgcaggaggacaaggagcagatggcgcagcagctggcggaggagacgcagggcttccagcggacgctggaggccgagcggcagcggcagctggagatgagcgctgaggctgagcgcctcaagctgcgtgtggccgagatgagccgagcccaggcccgcgctgaggaggacgcccagcgcttccggaagcaggcggaggagatcggtgagaagctgcaccgcacggagctcgccacccaggagaaggtgaccctggtgcagacactggagatccagcgacagcagagtgaccatgatgccgagcgcctgcgggaggccatcgctgagctggagcgtgagaaggagaagctccaacaggaggccaaactgctgcagctcaagtctgaggagatgcagacggtgcagcaggagcagctgctgcaggagacgcaggccctgcagcaaagcttcctctctgaaaaggacagcctgctacagcgggagcgcttcatcgagcaggagaaggccaagctggagcagctcttccaggacgaggtggccaaggcacagcagctgcgtgaggagcagcagcggcagcagcagcagatggagcaggaacggcagcggctggtggccagcatggaggaggcgcggcggcggcagcatgaggccgaggagggcgtgcggcgcaagcaggaggagctgcagcagctggagcagcagcggcggcagcaggaggagctgctggctgaggagaaccagaggctgcgtgagcagctgcagctcctggaggagcagcaccgggccgcgctggcgcactcagaggaggtcactgcctcgcaggtggctgccacaaagaccctgcccaatggccgggatgcacttgatggccccgcggcagaggcagagccggagcacagcttcgatggcctgcggcggaaggtgtcagctcagaggctgcaggaggccggcatcctgagtgcggaggagctgcagcggttggcgcagggccacaccacggtggacgagctcgcacggcgggaagacgtgcgccactacctgcagggccgcagcagtatcgcagggctgttgctgaaggccaccaatgagaagctgagtgtttacgccgccctgcagaggcagctgctgagtcccggcacggccctcatcctgctggaggcgcaggcggcctcaggcttcctgctggaccctgtgcggaaccggcggctgaccgtcaacgaggctgtgaaggagggtgtggtgggccccgagctgcaccacaagctgctgtcggccgagcgcgccgtcactggctacaaggacccctacactggccagcagatctctctcttccaagccatgcagaagggcctcatcgtccgggagcacggcatccgcctgctggaggcccagatcgccacgggcggcgttatcgaccccgtgcacagccaccgcgtgcccgtggacgtggcctaccggcgcggctacttcgacgaggagatgaaccgcgtcctggcggaccccagcgacgacaccaagggcttctttgaccccaacacgcacgagaacctcacgtacctgcagctactggagcgctgcgtggaggaccccgagacgggcctgtgccttctgccactcacggataaggctgccaagggcggggagctggtctacactgactccgaggcccgggacgtctttgagaaggccaccgtgtctgcgccgttcggcaagttccagggcaagacggtgaccatttgggagatcatcaactcggaatacttcacggcagagcagcggcgggacctgctgcggcagttccgcacgggccggatcacagtggagaagatcatcaagatcatcatcacggtggtggaggagcaggagcagaagggccggctttgctttgagggcctgcgcagcctggtgccagccgccgagctgctggagagcagggtcatcgaccgcgagctctaccagcagctgcagcgaggtgagcgctctgtgcgagacgtagccgaggtggacactgtgcggcgggctctccggggtgccaacgtcatcgcgggtgtatggctggaggaggcggggcagaagctgagtatctacaatgccctgaagaaagacctgctgccatccgacatggccgtggccctgttggaagcccaggccggcaccgggcacatcatcgaccccgccaccagcgcccggctgaccgtggacgaggcagtgcgtgctggcctggtgggccccgagtttcatgagaagctgctatcagccgagaaggctgtgacagggtacagggacccctacacagggcagagcgtctccctgttccaggccctgaagaagggcctcattccccgggagcagggcctgcgcctgttggacgcccagctgtccacgggcggcatcgtggaccccagcaagagccaccgcgtgcccctggatgtcgcctgcgcccgaggctgcctggatgaggagaccagcagggccctgtcggaaccaagggccgacgccaaggcctacagtgaccccagcacaggggagccggccacctacggcgagctccagcagcggtgccggcccgaccagctgaccgggttgagcctgctgccgctctcagaaaaggctgctcgggcccggcaggaggagttctactcagagctgcaggcccgtgagacctttgaaaagaccccggttgaggtccccgtgggtggcttcaaaggcaggacggtgacggtgtgggaactcatcagctctgagtacttcactgcggaacaacggcaggagctgtttcgtcagttccgcacgggcaaggtcaccgtggagaaggtcatcaagattctcattaccatcgtggaggaggtggagacccttcggcaggagaggctgtccttcagcggcctccgttcccctgtgccagccagcgagctcctggcttccggggtcctcagcagagcccagtttgagcagctcaaggacggcaagacgacggtcaaggacctttcggagctgggctccgtgcggacgctgctgcagggcagtggctgcctcgccggcatctacctggaggacaccaaggagaaggtgtccatctacgaggccatgcgccggggcctgctgagagccacaacggctgcgctcctgctggaggcgcaggcgggcactggcttcctggtggaccccgtgcggaaccagcgcctgtatgttcacgaagccgtgaaggcgggcgtggtgggccccgagcttcacgagcagctgctgtctgccgagaaggccgtcaccggttacagagacccctactcgggaagaaccatctccctcttccaggccatgaagaagggcctggttctccgggagcacggaatccgcctgttggaggcccagatcgccacggggggaatcatcgaccccgtgaacagccaccgcgtgcctgtggacgtggcctaccagcgcggttacttcagtgaggagatgaaccgcgtcctggcggaccccagcgacgacaccaagggtttctttgaccccaacacgcatgagaacctcacgtacaggcagttgttggagcggtgcgtggaggaccccgagacgggcttgcgccttctgccactgaaaggggcggagaaggttgaggtggtggagaccacgcaggtgtacactgaggaggagacaagaagggcatttgaagagacacagatcgacattcccggcggcggcagccacggcggctccaccatgtccctgtgggaggtgatgcagtcggacctgatccccgaggagcagcgggcccagctgatggctgacttccaggccggccgggtgaccaaggaacgcatgatcatcatcatcatcgagatcattgagaagacagagatcatccgccagcagggtctggcctcctatgactacgtgcgccgccgcctcacgggtgaggacctgttcgaggctcggatcatctctctcgagacctacaatcttctccgggagggcaccaagagcctccgtgaggctctcgagggagaatccgcctggttctacctctatggcacgggctccgtggctggtgtctatcttcccggttccaggcagacactgagcatctaccaggctctcaagaaaggcttgctgagtgccgaggtggcccgcctcctgctggaggcacaggcagccacaggcttcctgctggacccggtgaagggggagcggctgactgtggatgaggctgtgcggaagggcctcgtggggcccgagctgcacgaccgcctgctctcggctgagcgggcggtcaccggctaccgtgacccctacaccgagaagaccatctcgctcttccaggccatgaagaaggagctgatccctactgaggaggccctgcggttgttggatgcccagctggccaccgggggcatcgtggacccccgcctgggtttccaccttcccctggaggtggcttaccagcgtggttacctcaacaaggacacgcacgaccagttgtcagagcccagcgaggtgcgcagctacgtggacccgtccaccgacgagcgcctcagctacacgcagctgctcaagaggtgccgtcgtgacgacggttctggccagctgctcctgccactgtcggacgcccgcaagctgaccttccgtggcctgcggaagcagatcaccatggaggagctggtgcgctcgcaggtcatggacgaggccacggcgctgcagctgcgggagggcctgacctccatcgaggaggtcaccaagaacttgcagaagttcctggaaggcaccagctgcatcgctggtgtcttcgtggacgccaccaaggaacggctctcggtgtaccaggccatgaagaagggcatcatccgccccggcacagcctttgagctcctggaggcgcaggcggccaccggttacgtcatcgaccccatcaagggactgaagctgacggtggaggaggctgtgcgtatgggcattgtgggccccgagttcaaggacaagctgctgtcggccgagcgcgccgtcactgggtacaaggacccctactctgggaagctcatctccctcttccaggccatgaagaagggcctgatcctgaaggaccatggcatccgcctgctggaggcccagatcgccacgggcggcatcatcgaccctgaggagagccaccggctgcccgtggaggtggcctacaagcgcggcctcttcgatgaggagatgaacgagatcctgaccgacccctcggacgacaccaagggcttctttgaccctaacacggaggagaacctcacctacctgcagctgatggagcgttgtatcactgacccccagacgggcctgtgtctcttgccgctgaaggagaagaagcgggagcggaagacgtcctccaagtcctccgtgcgcaagcgccgagtggtcatcgtggaccccgagacgggcaaggagatgtcagtgtacgaggcctaccgcaagggcctgattgaccaccagacgtacctggagctgtccgagcaggagtgcgagtgggaggagatcaccatctcctcctcggacggcgtagtcaagtccatgatcatcgaccgccgctccgggcgccagtacgacatcgatgatgccatcgccaagaacctcatcgaccgctcggcactggaccagtaccgcgccggcacgctctccatcaccgagttcgccgacatgctctcgggcaacgccggtggtttccgctcccgttcctcctcggtgggatcctcctcctcctaccccatcagccccgccgtctccaggacccagctggcctcctggtcagaccccactgaggagacgggccccgtggctggcatcctggacacggagacgctggagaaggtgtccatcaccgaggccatgcaccggaacctggtggataacatcacggggcagcggctgctggaggcgcaggcctgcaccgggggcatcatcgaccccagcaccggtgagcgcttgcctgtcaccgacgccgtcaacaagggcctggtggacaagatcatggtggaccgcatcaacctggcccagaaggccttctgcggcttcgaggacccacgcaccaagaccaagatgtcggccgcccaggccctgaagaagggctggctctactacgaggccggccagcgcttcctggaggtgcagtacctgaccggcggcttgatcgagcccgacacgccgggccgcgtgcccctggacgaggccctgcagcgcggcacggtggacgcccgcaccgcacagaagctgcgtgacgtgggcgcctactccaagtacctcacctgccctaagaccaagctcaagatctcctataaggacgcgctggaccgcagcatggtggaggagggcacggggctgcggctgctggaggctgccgcgcagtccaccaagggctactacagcccctacagcgtcagcggctccggctctaccgctggctcccgcaccggctcgcgcaccggctcccgggccggctcccgccgcggcagctttgacgccaccggctccggcttctccatgaccttctcttcatcctcctactcctcctcgggctacggccgccgctacgcctcggggtcctcggcctccctggggggccctgagtctgccgtggcctgaggctgcctgcgcccaccccgctctgcatgcggcccagcccggctcccaccgaggcgcgggggccgttttcaacgcttaaaggttgtcttcctcccaagtggtgcctaaagtttaacccaaaaagaccggaattc
